United States Patent Application Publication US 2025/0195589 A1 - sequence listing, part 13

SEQ ID NO: 22 - DNA, 2375014 bp, Lactobacillus crispatus
  source 1..2375014: mol_type = genomic DNA
ttgttcgacattaataaattttgggaacactttaatgacgagatgcgtgctcgtttcaacgaagttgcctacaatgcatggttcaaaaatactaaacctatttcatataatggaaaaacacatgaattaaaaattttagttcaaaatcctgtttctaaaggttactgggaaaagaatctatcttctcaattgattcaatctgcctacggttatgccgacatcgagatcttacctgtatttaaaatatctgaagatgcggatattacagaaaggatcgtaacacctgcgccaaagcgtgaagcgcaagttcaacagcctaatttgccagaaaaagaattcactaaagacttgaagttaaacgaaaaatacacttttgataacttcgttcaaggtgagggaaacaagttggccgccggtgctgcacttgctgtagccgacagtcctggtagtttttacaatcctttatttatttttggtggcgttggtttaggtaaaacacacctgatgcaagctgttgggcatcaaatgctagcagagcgacctaacgcaaaagttgtctatatacagagtgaaacttttgttaatgacttcattaattccatcaaaaataaaacgcaggacaaattccgcgaaaaatacagaacttgtgacctgcttttagttgatgatattcaattttttgcaaaaaaagaggggattcaagaggaattcttccatacttttgagacactttataacgatcaaaaacagatcgtaatgactagcgatcggttgcctacagaaatcccagatctatcagagcgtttagtttctcgatttacatggggcttgcaagtcgaaattacgcctcccgatttggaaaccagaatcgctattttgcgacgcaaagctgaaacagaaggttggactatcgatgatggtacgcttaactatattgcatctcaagttgatactaatattagagaacttgaaggggctttagttaaagttcaagcttatgccacaattgaaaaagcagatattgacgttaaccttgcgcgtgaagcattagttgacctcaaattagttcaaaaaaatcgtggattacaaatctctaaaatacaggaggttgtcgcaaactatttccaaacttcaactgctgaattaaagggtaaaaagcgtgtacggcagattgtagttcctcggcaaatagcaatgtatctttctcgtgaattaacagatgccagtttgccaaaaattggtcaagaatttgggggaaaagatcataccactgtcatgcatgcttatgataaaatcgacaagcagatgaaacttgattctgatatcaaaactgctgtctttgacctaaagcaaattttggagcactaaaagttatccactgtggaaaaataaacaagttttacacaagtttttaaccgtaacaagtccgttattttaggcttcttatgagttttcaacagaactcacaggccctactactactaattaattatataattactaataaagagaaatcacacagctattcttgggaggaaaaacatgaagtttacaattaatcgcaatctgtttatcgaaaacctcaataatgtaatgcgggccatctcatcaagagctactattccaattcttagtggaattaagttagacttaacagaagataaacttacgctaaccggtagtgatacagatatttcaattgaaattcaaattccagtcaatgatgatttaaatgtggaatctacaggttctattgttttaccagctagattctttagtgaaatcgtaaaaaaattgcctggtaaagacttctcatttgaagtaaaagaaagttttcaaactcagatcatatctgaaaatagtgaatttacaattaatggtttagatgctaataactatccacgtttaccagaaatttcagatgctgcttcattcactatttctggtaaaactttccgtgaaatcattaatgaaacgcaatttgctacttccaatgatcaaacacgagcaattttaactggggtacgtttcttctttagtccagataaaattaaagctgtcgcaactgattcccaccgtttatctcaaagaacaattgctttagaaaacggacctcaagctgaaactgatttgattattcctggtaaaagtttgcaggaattagctagaatcattggtgaagctgatccagaagttaaagtttgcccaggtgataaccaagctttatttgtaattggcaacttgtccttctattcacgtcttttggacggaaattatccagacactgatcgcttgattccgactgaaaagaccactagtgttgaatttgacatttccgaattatctagtgcccttgaacgtgccagtttgttaactcatgctggccgtaacaacgtggttactttgactttagatgtagaaaatcaatcagctaagttatcaggtaaatctgcggaaattggtaatgttgaagaagatgttagcttcagaaatcttgaaggaaacaatttagagatttccttcaaccctgactatatgcgtgatgcgttaagagcttcagtaacagattctgtaattatgagttttactaagccacttcgtccatttatcattaatccagataaagaagacattgaatttgtgcaattaattacgccagttagaacatattaatcaagtacacaatatttaggtcataaaaagtcgtcaaataaggcgactttttattttgcttttaaacgaaaacgcaaaatattggcgtatatttatttttttaccgtgctagtgtgattaggttattttgaaaaaaagctctgaaaaggcttataagagcgatttagtttgttatttgtgttgaaaactaatataattatataggtataaagcgtattgaaggtgagcattattaagtattttaaagttgacggcgatcatattactttggggcaattcctgaaggaagagagcattatttcatcaggtggacaagctaaatggtacttaaaagataatccagtaactttaaatggtgaacttgaagatcgaagaggcaaaaagatgcatgttggtgatcatatagtggttaatggccaagaatatgagtttcggtagggaagtcaatgtatcttgatcattttactgtacagaattttcgtaatttaaaaaagcttgacgtaaattttgattcaaacgtcaatatttttattggcaaaaatgctcagggcaagaccaatttgctagaggcaatctattttttagcattaacacgttcacataggaccaataatgataaagatttaattggtttcggcggtgagtttaccaatttacttgggcatgtacataaaagccaggtggatcttgatttacgtgttttgatcacccaaaaaggtaaaaaagtatggattaatcgagttgagcaggcgaagttgtctaaatacgtaggtcagctgaatgcgattttattttcaccggaagacctcgagttgatcaagggtgcaccagcactgcggcggagatttatggatcaagaatttggtcaaataaatgcagagtatttatacttcgcaagtaagtatcggcaagttttaattcaaaagaataattatctgaagcagctagctaaaggtaaggcaaaggatcaggtctttttagatgtactttcagatcaactagctggtatcgccgctgaagttgtctttcgacgatttaaatttcttaagtatcttagtcactatgctagcgatgcttatgcacatattagtttaggcagtgagcagctttcaattgcttatcatccatcagtggctgacatccaagctgatgacagtacagaagaaatttatcaaaagattttagcaagttatgcacgaaataaggcaagtgaaattcgcaaggggacaactacttctgggccgcaccgtgatgatattgaatttaaacttgatggtcaaaatgcacatctttatgcttcgcaagggcagcagcgttcaattgcacttagcgtcaagctggcggaaattcaattggtgcatcaactaacagatgagtatcctttactcttgctggatgatgtaatgagcgagttagatcatggtcgacaaagtgcgctacttaattatattcatgggaaaacgcaaacctttattactacgactgacttagaggggatttcctgggaaataattaaaaagccgcgtgtgtatcacattcaatcaggcaaaattagtttggagaaggagaattaaatggctgataattcaaaagaaaatcttgaaaaggtcaaaaaatatgaaaaagaggctgacaagtataatgccagtcaaattcaggttcttggcggtctagaagctgtacgtaagcggccaggtatgtatatcggttcgactagttctcagggattgcaccacttagtgtgggaaattattgataacagtattgatgaacgacttgctggttttgcgaccaagattgaagttacgactaacgaagatggtagtgtcaccgttcaagatgatggacgtgggattcctgtagatattcaagaaaaaacaggtcgtcctgcattagagactgtatttactgtacttcacgccggtggtaaattcggcggtggtggatataaggtttctggtggtttgcacggagttggggcttcagtagttaacgctctgtccactaaacttgatgttaccgtaatgcgtgatggcaaaaagtactttatcgatttcgatcatggccgtgttaaggatgagatgaaacaaattggcacggttccacttgatgaacatgggacgattgttcacttctatccagatccagatattttcacagaaactattgtttttgatgacaagatcttgaagaacagaatccgtgaattggcctttttgaacaagggattaactttaacctttactgacaagcgtaaagacactgccgaaacagatgtgtataagtttgaaggtgggattaaggaatacgttgcctttttgaacaagggacaagaagtattatttgatgatccaatttatgttgaaagcacctataatggcattgatgttgaagtggctttgcaatatacaaatggctataagactactttgatgacttttgccaataatattcacacctatgaaggtgggatgcacgaggccggttttaagactgcgttaacacgtgtggttaatgactatgcacataagtctaagatcttgaaagataaggacgataatctttccggtgaagacattcgtgaaggaatgacagctattgtctcagttaagcaccctagtccgcaatttgaaggtcagactaagaccaagttaggtaattcggatgctagaactgctgtagataaggctttttcagaaacctttagtcgtttcttgatggaaaatccttcagttgggcgcaagatcgtagaaaagggtcaattagccgaacgagctagaactgctgccaagcgtgcacgtgaagtaacaagaaagaaatctggtctggaaattgctaatttaccaggtaagttagccgacaatacaagtaacgatccaagtatttcagaactgtttatcgtcgagggtaactcagccggcggttctgctaagcaaggtagatcacgtttaacacaggctattttgccaatcagaggtaagattttaaatgttgaaaaagcttcgatggatcgaatcttggctaaccaagaaattagatctttattcacagctttaggaacaggctttggtgctgactttgacgtttcaaaagcacgttatcacaaattgattatcatgactgatgccgatgtcgatggtgcccacattagaaccttgctgttgaccttgttctataactatatgcgcccaatgatcgacaagggctatgtttatatcgccaagccacctctataccaagttcgtcaggggaaagtggtcagatatcttgatactgacgaagaattgcatgattacttaggtagcttgcaaccaagtcccaagcctactgtgcaacgttacaaggggttaggtgaaatggacccagagcagttgtgggaaactactatgaatccagaaaatagaagactggatcgggtaagtcctgagtatgctaaagatgctgacgcagtctttgagctcttaatgggaaatgaagtttcaccaagacgtgactttattcaaaagaatgctaaatatgttgaaaacttggatgcataggaggattagatggacgagaatcaaactcaagatcatagaattaaaaacgtcgatctaactagcatgatgcgtagttcatttttggattacgcaatgtcagttattgttgcacgtgctttacctgatgttcgtgatggcttaaagcccgtacaacgtcgtattctttacggtatgagcgagttgggggtaacgcctgataaaccatacaagaagagtgccagaattgttggggaagttatgggtaagtttcacccccatggtgattcctcaatctatcttgctatggcacacatggcacaagatttctcataccgttacatgttagtcgatggtcacggtaacttcggttctgtcgatggtgatgagccagccgcaatgcgttataccgaagcaagaatgagtaaaattgctgtggaaatgttgcgcgatatcaacaaaaacaccattgattggcaaagaaactatgatgataccgaaaatgaaccggttgtcttacctgctagaattcctaacttgcttgttaacggtgctaacgggattgccgttgggatgacaacaaatatcccgccacataacttgactgaagttattagtggtttgcacatgttaatgaaaaatcctgatgctacaaccaaggacttgatgaaagttatcctaggtcccgattttccaactggcggaattattatgggacgtggtggtatctaccgtgcttatgagagtggtaagggtaacattgttgttcgcgccaaaaccaatattgagactgaaaagagcggccgcgagcgcataattgtgagcgaaattccatttatggtaaacaaggctgaattggtgaagaaaattgctgatttggctcgagaaaagactatcgatggaattactggtgtgcgtgatgaatcagaccagacagggatgcggattaccattgatattcgccgtgatgctagtgctagcgttgttttgaataatttattcaagcaaactcaaatgcaggctaactttggtatgaatatggtggctattgttgatggtgcgccacactttttaaccttgaagcaaatgctgcaatattacttggatcaccaagaagatgttgtaactcgcagaacaagattcgagttagctaaggcagaggcaagagcccacatccttgaagggttaagaatcgctctggacaatattgatgaaattgtccacattatccgcaatagtcaatcaagtgacattgctaaagcaactttgattagccgctttggccttgatgataagcaatctcaggctatcttagacatgcgtttggttcgcttgactggcttggagcgcgataaggtagaagctgaatacaaggaattacaagctaaaattgctgactacaaagatattttggctaagcctgagagaattgaccaaattatctatgacgaattgcttgatattcaaaaacgattcggtgataagcgaagaaccgaaattggtgctagcgaagtcgtttcaattgaagatgaagatttgattgaaaagcaaaatattctgttgacggttacccataacggctatattaagagaatgccaattcaggaatttaagactcaaaaccgtggtggtaaaggtatcaagggaatgggtgtacaagatggcgactttattgagcatttgatttactcaagtacgcacgatctattactcttcttcaccaatgccggcaaggtttactctaagaaggcctatgaaattcctgaatatggccgtatggctaaaggcttaccagtagtaaatcttttgcaattggaaaagggagaaaaggttcaaacagtcattaacattccagaaaatgcggatgacaattacttgttctttattaccaagatgggtaccgttaaacggacacacgttagcgaattttctaatattagaaatagtggtctaattgccttaaccttgaaggatggcgacgaattgagtaatgttttgactactgatggtaagcaaaatatcttgatcggaacgcatttaggttatgcggtaacctttagtgaaaacgatgtccgggcaatgggtagaactgctgcgggtgttcgcggaatcaatttaagagagaatgactatgtagttggatctggcgttttaggtgctgatgatcaagtcttggtaatctctgaaaagggctatggcaaacggacgccagccgcagaatatccagttaaaggccgtggcggtaaaggcattaagactgccaatattactgaaaagaatggtcctttggccggcgtaacaatcatcaactcaaataatgatgttatggtaattactactgatgggattatgattcgcttcaagattgaggatgtttctcaaactggtcgtagtacaatgggcgttcgcttaattaaagtcaatgacggcagtcaggttgcaagcttaactattgttccgactgaagaagaacaagatcaaactggtgacgatgacgagcccaaaaatgaataattaattaagaaaaacaaaaattttgaacttttaaaaaattatcaaacttttttgcgtaataaataatgagcagtaaaaaaactgttaggatcacgtgaaaactgtttggtaattttttgtttatatgctaaaattagaaattgcgagtaatattccattactccttgttcttgattttagcaagaaccatatagtccaaaaggaggtgcaatagtcatggcaactacaaagtacgaagtaacttacatcatcaagccagatgttgacgaagacaacaagaaggcagttgtagaaaactacgacaaggttatcgctgataacggtggtactatggtagaatccaaagactggggcaagcgtcgtttcgcatatgaaattgataagtatcgtgaaggtacttaccacattatgactttcactgctgacaacgctgacgcagttaacgaatttagccgtttgtcaaagattgacaacgctatcttacgttcaatgaccgttaagttagataagtaattttaatttattatccgttatgtgatttaggaaaggaaggtacatgagtatgattaatagagttgtacttgttggccgtttaacacgtgatcctgaattacgtactactgggagtggaatctcggttgctacgtttactcttgctgttgaccgtcaatttacaaatagccaaggtgagagaggcgcagatttcgtcagctgtgtaatttggagaaagtcagcagaaaacttctgcaactttacttcaaagggttcattagttggaattgatggccgaattcaaaccagaagttatgataataaagatgggcaaagggtatatgtaaccgaagttgttgttgataacttcgcattgctcgaatcacgcaaggatcgtgaagcccgcggtcaaaatggtggttatacaccaaatagtggaaatgctggcagtcaacctgctaacaatttcccaaataatggcggatcacaaggtaattcacagactaataacaatcaaaataattcacaagatccatttagtggctcaggtgatacgattgatatttctgatgacgatctaccattttaaactaaattaaagaaaggattctagaacatggctcaacaaagaagaggcggtcgtcgtcgtaaggttgactacatcgcagctaaccacatcgactacgttgactacaaggatgtcgatctgttgaaacgttttatctcagaaagaggtaagattttaccacgtcgtgttactggcactagtgctaagaaccaacgtaaagtagctaatgcaattaagagagctcgtatcatgggcttgttaccattcgttgctgaagactaatttagatcgaaataaaccaaaaggacaggacacaaggttctgtccttttttcgtataataattaaaaaaattctctcttcgtattgtaccctaagtgtataattttttacggtaagttgaataaataattaaaaaagcccaagtcctttgaatttggacttgagctcaaacaaaaagaccagtagtctgatgttaagaacaaaaaacacattagaagctggtcttttatgaattcaattgtaactgaaatcgcaaatattataaagtctgaagataattatattaagcgtgaaagaaaaataatctgtttcttcttaaacctgattaaggaaatcatggccttggctttagctaaagttgatgatgaaatgattaccaaggttaaagcacagggatatcagattgataagaagaatgagcgctcaatcaatatggcttttggcgaagttaggtatgtcagaagaagatatgtctgcccaggcaaacaagcaaggtatcccttggatgaattaataggctttgacaaatacaagcgctacagtattttagcagtcaaaaacatcttagaagtaagcagcgttgccacttatcgcaatactgctctagcagtcaattgcctgtctggctttaatattagccatatgcaggtgggcaatttggtaaaaatggccgggaaaaatattaaagcgggccaagaagcagattcaagatatgatgccgcaggcactaagaaaaaggtcccagttttgtatcttgaaggcgatggcgtggtgatcaaaggcactaaaagccggttggaatttcatcgctatcaggtctgtgaaggcattgtcaatataagcaagaaacgcagaaagcgaatcaatgccaaggaatttgtttctttaagccgacttgatgcgctgaacgaagccaaggagtacctggccaatacttatgatctttctgatactgtaattcttagcaacgccgatggcggtgctggatatgtcaaaacagacttcgatgacattgtagggctatgcaagcgtcatgagcatttcttggatgtctttcacctaaataagaaaatcaaagaaaggctatattttgcgcctgacctgcaaggcaagctgatttctgctttggaatacaaatacagctatgacaaaactatcctaaccactgcagaaagccgactaattgatgaattgaataccgagctcaatcatgattatctggggcgcctaaagaattatattgatcgtcattgggacgatattaagccgtttaagaaacgaaaactgactgtgactaaagccattggctgctgcgagagcaaccaccgcaagtatacctaccgtgttaaggggcaaggcaagaaatggtcaaaatctggagcagaaggcatgcttaggatcttaagctgcatcaagaatcgagagctggaattttggcttagcagcgagtttgaagattcagaaataactgtattgactgaacaggaattaaaagcagcggcccgtgacagcttaaagaagcgtcatgaagttcatttaggcatccagcatggcgcattaaccgcacaggtagctggcaatagttatttaagcaagctaagcagaaatttaagtcatataaatatttaagaaattaaggttagactaatggtttaaaggctaccgcaaaaacattgacacttactattgtacctactgttttcaatcatgagccggaataaggtataattaacactgatatactatatacgcgtggtgctagttaaatcgttttagttaataaaaaagtccaattagactagactcaagttgtaagtaatttaaatagaaaagagtctgatctaattgaactatctcaagcttaatcgtttttctcaccatttacaagttagttttaatcggttaaatgtgatttgtcgctcgctgtataagctttatgcgcctgatggacttaaacatcgtaaaaatgttgatcagaccaagcttcctgatagttctatcttagcgatgctcatttggcaaactaaaattggaattgaatctcaacgaagattctgtaaattcttcgttggcttatctcattctcgttttaaccgtcgagctcgaatgctcttgcctctaattcgttgtatccgtcagggttggaatcaggaagtaaaggtaggtggagaattattgattatcgacagttttccgattccagtttgtcagcctgttcgcaattatcacgttaagatcttccgtggcatagccgatattggttataaagcgacgaaaaaaatctactattatggcttcaaagtccacgcaatagtgagtgatgatggctatctgcttgactacgcagttactaaggcgtcggtacatgatgcaaaagagacggtagaattgatgatcaatgctcatccaattaaccattatcttttaggagatgaaggctatttaggaaaagacttagcagccaagctaaagcgtatgggatacgtgctttggacaccatatcgtaaaaacatgaggggtgctaaaaagcataatgatcatcagttaatggcaattagaagaacaatcgaaagcgacttttctttgcttagctattacaatgctgagaataatcgagccaggagcttagtaggttttcaacaacggctagaaatagctattttagcttataatatggcatattgtctagaacgatttaactagcaccacgcgtatactatatctattaggaaggatcttcatgaaggattttttacgtaagctagaattgcctgaatttattaaggattcacggctgacagcttctataatcattgcactttctctttcattattgggaagcattattgcgatgattatgaatccattgtttggtttggcaatgcttttagtctttattttgaccgttgcctttgccatctatgggacctatattttagcgggtaatgcaaatagctttgcggttaatttgtcttaccagataaagcgtagtgaacaagaagcaatgattaagatgccgttgggaattttgctttatgattcggatcaccaaattcagtgggttaatccatatctgcaattatatttaaagagtacagatttagtggggcacacaattgaatcagttgaccctgatctgaataagctacttaatgaagcaattgaggcaaaaacagcagaaaatcatctggttgattgggatggtcaccgatttgaaatggtggtccaaaataatttaggcgtaatatatttattggatattacgcgctatgccaaaattgaagataaatataaagctgaacgattggcgattggtcaaattttcatcgataattatgatgagctaagtgaagcaatgcatgatcaagaattgaccagcatgagttcatatgtgcaaaatacattgagtgattatgcgaaaaagtttaacgcatatttaaaacggattgatgaagaccatttcttgatcttgatccatatgcaagaattagctgagatggagaaggacaaattctctgttttagataaggtgcgtcaagaaacgagtagaaacaatacgccacttactttatctatgggaattgcttttgggagtgattctttgtctgaaattgccaaccaggctcaatctaacttggatttggccctaggtcgaggcggagaccaggttgtcttacgtcaacccggtaaagacgcccgcttttatggcggtaagtctaatccgatggaaaagcggactagagttagagcaagaatggtttcacaagcaattagtgaactatttaaagatgccgatcaagtttttgttgttggtcatcagcgtcctgacatggactcagtcggtagtgggattggcgtagtaaaattagctcgtcttcacggagttaaagctaattttgttttagatactaataagacaaactatgatgttggtcgcttggtcaccttaatgcaacagaaaaatcaggataaggatatttttattaaccctgatgtagctttagctcaagttactgacaagtcaatgttggtaatggttgatcattcgaagtattcaattacttactcacggtcactttatgatcgtttgaagaatcgaatcatcgttattgatcaccatagacgaggcgaggaattccctgaaaatccaatgttaacctatgttgaaccatatgcttcttcggcttgtgaattggtcactgaaatgattgaatatcagcagccagctaacggtaagcgagttttgaccgatattgaagctacagcaatgttagccgggattgtggtcgactccaaggaattctcgttgagaacaggaactagaaccttcgatgcggctagttacttacgttcaatcggggctgactcagcagttgtaagcatgctcttgaaagaggacattgatagtttcctcgaacggacgcatttagtagccactttgaagatggtgaagccacatatggccgtattatgtggacctgatgataagattatagatccgatcattacagcgcaggcggctgatactgcacttgatttggaaaatgtgggtgctagtttcgcaattacgcggcgcagtgataatacgattggtatttcagctagatcaatgggtaagatcaacgttcaaattattatggaaaaattgggcggtggtggacatctttctaatgcggcaacacagattaaagatgttactattgaagaagcaaaacaaaaattgcttgatgcaattgatgaatatgaaaaagaaaatgattaggaaggacaaatatgaaagttatttttactcaagatgttagaggtcgaggtaagcgtggacaagttaaggacgtacctgatggatacgcacaaaattacttgattaagcgaggcttggctaaagaagctactaaaggtaacatgaataccttgaagcgtgtagaagctaatgaaaaggctgcttatgaagcagaaaaggccgaagcagaaaagatcaaggcagaacttgaaaaagacgataccgttgttaacttcaaatctaaggctggtactgactcacgtttgtttggttcaatctcaagtaagaagattgtggaaggccttgaaaagcaatacggtatcaaggttgataaacgcaagcttaacttgccagaaccaattaagactttgggctatactaatgttcatgccaaattatttaagggtgtagaagctactattcgcgttcacgttactgaacaagactaataaaaagtggttgtgattgatggataatatcgtttctcaacaaattccgcatgatcgcgatgccgaaagggcagttctgggtgcgatttttatcgatcctgaagcaattgcggatgctagtgcggtagttcagcctgaagatttctatgagcgggctaatcaaattgtctttcaagcgatgttggacttgtctgatcgcggggatgcaattgatacgctgaccttgcaggatgaattaaacaaaagaaatcagttagaagatattggtggtatcggttatgtttctgaattagcgatggccacaccgacagcagcgcatgttacctattatgccaaaattgtgcataggaaggcgctgcttcgtcgtttaatctctgctagtcagaagattatctctaatgcaatcgatggctctgacgatgtaacagacattctagatgacgctgaaagtgaaatcatgaatgtctcgtcagagaatagcacaggcggctttaggaccattaaagagatcgttaattcagcgattaatgatattaataatattccggatgacggaaatatggttactggcttgccgactggttttgcggaattagataagatgacaactggttttcacgatgatgaattgatcattgtagctgctcgtcctggtgtgggtaagacttcatttgccttaaatattgcgcaaaatgtagggctacacactgaaaaaagtgtagctatgttctcactagaaatgagtggagagcaactggttcagaggatgttagcttctgaaggactgattaattcacagcacttgagaactggccagcttgatgaagaagaatggcgtaaattggtagtggcttctgggtcactagcaggtgcgcaaatctttatcgatgatacgcccggaatcaagatgagtgaaattcgtgctaaatcacggcgattagctaaggaaaagggcaatcttggtcttattgtaattgactacttgcagctgattgaagggccacgcagtgaatcacggcaacaagaagtttctgctatttcaagacagttaaaaaagctagctaaagagttgcacgtgcctgttattgccctttcgcagttatcacggtcagttgaacaaagacaagataaacggcctgtattatctgatattcgtgaatctgggtcaattgaacaggatgccgatattgtttctttcttgtatcgtgacgattattatcgtgatgaaccagatgatggtgaaagtagcggtagtcaagatgaagttggcgcagaagacgataatggtgaagtagaagtcatcattgaaaagaaccgttccggtagccgggggacggttaagctaatgttttcaaagccattcaaccgtttttcaaatttggattatgcgcatgatcctaatggtaattagaaaaagcactcgatgagtgctttttctatgtttgaatataatacgaataatatttacatttataatggaaattgtttatatttggtgttgaaatgataccataagtttgctataactattactgaaaagagtaataacgaatatactcatggaggaatagcaaatttatgaaatttaagaagattttggttggtgcttgcgccgtcttggcagctgtctcattagctgcttgctcaaatggtaagaagagttcatcttcatccagtgaacctaaggaattaaacgttgagtttgtgccaagtactcaagccaacaagatggaggctaaggctaagcctttaggtacgcttttacaaaagcaattgcatatcccagttcatgtgaccgtttctaccgactatagcggtctagttgaagcaatgtcatctaagaaagtagacgtcggcttcatgccaccatattcttacatattagctcataaaaagggaattgctgatgttttattgcaagccgaacgttacggctatgatgaaccatccggtaagatgaatcataccttaatgcataagtatcgtggtatgatcgtggttaagaagggctcaaagatcaaatcttggaaagacttaaagggtaaaaagattgcgattggcgatcctagttcttcatcaggctatgtttatccagttgcggaactttacaaaaagggtttgaatgtaaccaaggactgcaaattagttaatgttaagggtgacgatcaagaagtgttatccgttttgaatggggatgttgatgccgcattcgtcttctcagatgcacgtaatattgccgctaaggatgacaagaaagcaatgaccgatgttgtgccaatctactttaccaagtggattccaaacgatactattgcggttagaaaagatatgcctaaaaaattcagagttaagttagctaaggctttcaagaatattgctaagtctaagaagggtaagcaaattatcgaaagcatttataaccattatggttacgttgaagctaaggattctgactttgatggcttacgtcaataccaaaagatcgttaacaaagctactggtggcagtaactaaaatagaataatttaattgaaagggctcaccattacgggtgagttctttttgtttctatataatatatcagttaaaatagacataaaagaaatgaagaaagaagaaaaatatgaaaattgcggttttgactgatagctcggcttatttaactaaagaacaacaagaaaaatatcaaatcgatgttttgccaattccaattatttggggcaaaaaagtatatcatgacttagtcgatattggttatgaagaattttatcaaaaactaaatacagcaaaagagctgccaactacttcgcagccttcaatcggtgatcttaagcagaagattgatgaatacgtggcagcaggctacacggatgttattgtaattactctttcaagtgggatttctagctatttctcaaccgttcagagtgttgcggcagaagaagaccgaatcaaggttcatccattcgatagtaaaattacctgtgctggtgaggcggattatgctatgttggcaggccgtttaatcgaggctggagcggatattgatttgatcatgcatgatcttaaggacttgcaaaaaacaatggatgtgcgcttcatggtggacgatttgagccatttaaagcggactggacgtttatctaatgcggctagctttgttggtacgttgttcaagattaagccgattttatcgatggatgtgcaaaatgaaggccatatttcagcgattgcgaaagagcgtcaatataaacgtgcatacaagcatgtgcaaaatgattttgataatttgactaaaaatatgccgtataagattcaggacacaatttttgattcacttgatcctgagaaaaagcaagagtggctggaagattaccaagcaaagtttcctaagtataagttcgataccagcattatcggaccagttgttggcgtgcacgtgggacaaggaacaatgtcgatgatttggtgccgtgatttggatacttattttgatgaaaatggtcagccaatcaagggaattgagtcacaagcagtagtggatccagagtaagcataataccgatatggcaaaaaaatgagaggcactattgattttttaatatcattgctatattattattaataatttaatatggcgatgaatagggatgatcagagtgtcaatcagttctttttttaaaaagttaatagccaaaaataaactcttgtttttagctatggtgattactagtgcttttgcttctttagatggcgtcatttctccttatgttattgggaaaattactaatacactttctcagaaacattttagtgagataccgaaaatcttgttactgtatctgttgatgatgctttttctgaatgttagcttttatctatggcaattttgttggggaaaaattaccaaatcaagtaatgaattattgagatctacagcttttaatacttttattgcttcccctagtgaaaagaaaatcactaataccctgaattttatcaatgttaatgttaaacaaattgaaaatcaatgtattgattcaacaattatgcttgtttactgcgttgagcaagccatcgtttcattagtttatattttaagtattaatggcattgcagcaatggttttcttagtttgtgggttaattccatcagttattccacgtttaactcgtaattgggttcagacaggaactaaaaagtggaatagcagttatgaaaactataatcaaaaaacaagtgatgctgtgcatggtttcgatactatcagacatgcaaatggtgataatagattcaaaatatttgtccaaaaagcattaatgggagaagaaaagaagtattttttgatgaattttcggcgtaatacttctaattttttagcccaggtctcttattcattatcaatggttatttctttggctgttggtacattctttgtaattaatggtcaaattctagtaggtggtttgatttctctatttttagcatcagatcgtttaactagtccaattatttcgattgttaatattgcaaatcaattgacctctgttagtcctctgctaaaaaataaagctttacaaaaatctaaaaagcaagaatttaataatttagacttcaccaaattaccaaaccaagagaaaataatttttgatcactgcaatttagggtattctaataaagctattttgaagaatattaatttgacagtttctaaaggcaataaagtattgatcatcggtcgttctggtattggtaaatccactctgttcaagacattgcttaatgaaattccattgctaaagggcaaaatactggtggatgatagtcttaaccaagctaatttctataccaattttggtattgttagtcaggatacttatatattcgctgaatctttgcgctttaatttaacgcttggaaaagattttcctactcagcaagtaataaatgttttgaaaactgttaaattaagttatttagctaatgaaaaaagcttagacatgcagatcggggagaagggattatcactttcgggtggagaaaaacgaaaactggaaattgcacgagctttattgaatcaaaaatcgattttacttgttgacgaaggactatctggacttgatgaagaaagcaataaacaaatttttgcacttcttcaaagtcttccgcagacagtaattgaaattgaacatgctgttagtccagaagagaaaaatcaatttaatcaaattattgatctaggagctcagtattgatttttttataaataaacaaaaacaattacatacgtatgaaagcctttacacataaagacttttttatttataatattagcagcacgaaaactttttggagaaaaacttacatacagaaaaggatgagaatatggcagaaaagaaatatgtcggcagtatcgaagcaggcggtactaaatttatcgtagctgtgcaagatgttgaaacaggtaaggaagtagcgcgtgatcgtattcctaccactactaacaaggagactttacaaaagactgctgagtttttcaaaaagcaccccgttgatgcattaggaattggtacttttggtccaattgatatcaatcctaactctcggacttatggttacattttggacacgcctaagccaggttggtcaggtacggacgtaaagggcttttttgaaaaggaattaggtattccggttgccatgacaactgatgttaatgcatcatgttatggtgaatatgttgctcgcggccgcaatgattctaagagttacttctacgcaacggttggtactggcgttggcgctggaattgtacaagcaggtaagttgctcggccttaataatcacccagaaatgggccacatgttggttcgtcgttatcctggtgatgattatgagggtcactgtccattccataatgatgcttgtgtcgaaggcatgtctgctggtccaagtcttgagggcagaactggtatccctggtgaaaaattgtctcgcgataacaaggtcttcacttattctgcgtattacattgctcaaatgctcttcaatgtttacatggctgctcgtccagatgtaatgattgttggcggttcagttttaaatgaagatgatttggttaaggtaagaaagttctttgatgaatttaacaacaattacgttgccacacccgatttgaatgaattaattgtgcgtcctgctgtggctcacaacgggtctgcaactcttggcgattttgaattagctaagaatttgctcaaataaaaaagcatagataaattgaataagcaataaaaaggctcaactcgttaagaaagacgtaaggcgagccttttttgacgtaatttgacctaaatgcgcgtaatattaattctagaaacgtaaccggtttattaagaaaggagcccaactatgaacaaatcagatagtggcttaaaagacaaagttatcggtaaagtgaaagaagtcgaaggtaaaattaccggcgataaatcacgcgaagtccaaggaaaagctcaacaagccaagggcaaagttaaggacaaagccaaaaaattaaaagatgatctggaaaaagaccatcaaatagatgaagattgttaaagactcaggtcgactagcaatagctaaacagaaagcaaataggtgatcctatgttatcatggatctgggttttaatcgttggcgctataataggtctaatagctggtttcataaccggcaagggtggatcaatgggatttctagctaatttaatagcagggctggttggttcaaccttaggccaagcaatctttggttcgtgggggccgcaaatggctgggatggcaatcgtaccatcaatattgggagccgtcatcttggtactagtggtttcctttgtactagggatgcttagaaaaactgaataaaaatagaataagagaaaaaagacatgctgggcatgtctttttttgtgtttcatgtgaaactattttagcttttttcgttcattttctttctcagctaaaaaacgttgcttaatttcttcaggcaaaagactagggaccgtcttgtcataaaattcaaagaatatgggtgccttgttagagtcattgctcttgggatataaggcaaagtcactttcgctaaacggtaagctgatattaccacgtaaagcattgataatctcaccgaacatatgcaaaacataacggcgcgtctcaggctctaatgacatgattacgcgactgaaacggacagtgcctaataatttatgggcagtaatttgaaaaatatcggtaatatttaattcatcaaatgcttggaaaagagcatcccataatgcaccacgttgcttttcagggatgctgtggttaaagtcgatgaagaaatgccgcaaagaacgtgcacctgaagtaagtccttctgctagaacaaaactatcacggccaacagaccaacggcgtggatcatgttgctggaccatcggtgcagtgcttttgacgattaaaacgtgttcaggatgatcaagcatggtgccaatgattgaagcttctgggaggtaggtcttcatcttgggtaatgcacgtacaaagccaggtgctttccagacttggtggaaaaagccggggccgtcaaagctaaaggccttgataatgcggtcttgcaattttggctcggctacgcttaaagcatattcagcgtaattgccgcccttagaatgccctgctaaataaattttgtcatggggaaaggcggcagccatttctttgagataattggcagcaacatcttgaccataaactttgggcatgtagttcatattcatgtcttcgttccagccgatgattgagttgtcggttccgcggtaaacgatgataattgtattatcgtttaggcgaaaagtagccgcggtaaattgaagtggataaggatccttttccagccgattagtccaattaaggattttgatgtcgcctagacgaggtgatttaggtaaaagaagaatttgatcgccagctaaatctttcatttgaacttgaaatgaaggaaggacgtgtaatttttctgcgacttcacttaaggtatgttccttagcagatttgtcgacgggtaagtagatgattgaggcgaagagggatgcgtccacgctattaaaaggccgttctttaaaagaaagatctccccgccaacgtaaataatcaagtgttccagccataatctcatcctttcattaattaggcaatattactattttactaaattgtcgcgccaaaataaaaatctcaagctaatgcttgagatttaaaatgattttacataccaccacgggtatagctaatgcgagtaatatcaggatatttacgtagattcatgacaatagagttctcatcaatcttattattaatgattccgtcaacgtataaaacaatacggttatcactcacgtcgagaattttaacagtaacattttcgacgtgattatctgctagttcttgcctgattttagacaaaatgtggtgctggttaatagccacaatttgaatgttaaaacgaacatgtggcgttattttgttgataatgacatcatcgtgaaagatcatttgaatgataaacaatagggcggttgataggataccgatgaaatacatgccagcaccaacagccatcccgatggcggcagttgcccaaactccagcggcagtagttaagcctgagacctgttcttttctaactaggattgtacccgcaccaatgaaggaaattcctgtaacgatctgagccgcaattcttgatggatctagtgcaatgtcatgcatgcttaatagatcggtaaatccatatttagatacgatcatgaataaagcagaagcaatcgcaactacgatatgagttctcacacccgcgctttttctctgaatcgcccgctcatagccgattaatgcgccacaaaaagctgcgacaacaattctaagtagccaatctaattcggttgtaattggagctaaagtttgcattatttagtcctcatcctttgtataatcaacaattattatcatttctattttaacgtaaatgcagaaaaattatagtctggggaatttttttgaacttttttcaaaaaaagacttgcacagtttccatctatatggtttaataaatactgttgtcgggtaagacaacgaagagttgctgacttagctcagttggcagagcacctcactagtaatgaggaggtcggaggttcgaaccctctagtcagcattagttaaacaacttacaagtttttaagtctatcatttaagttcgaaagagcttgatatgatagacttttttgttacttataattatttgtgtagatttaaaaatagatatgaatacttagtttcaccacaaaaaatgccacacagtttttctagtgtggcatttgtgtggcaaaggtactataaatactgtaatgacaggctttattgtttgtcattttttgatttatctgaattatcagatgaaaagaaattttctttagcaaattgtagactctgtataccttgatcaatagctgataaaagttcttttttagtagcttgagtattgattacttttgaagcagttagttcaatgttatgagccatattatcaacttcatcaattaatatattaaagtttctattatctacatctttagaatattgatcttttaatttattaagaactaaattttcaaattctttatttgttgttccaactagggaattgataaagttaagatctttaaatagaaaggagaaatcttttttccaaaattcattgatttcatcaaattgaggaaaatgtgttttttctgctgtcttatcaatatcgccgtctttattacgataaaaattcagaggagtattatagtcacccaaaaatagtaggtagttttttaagtattgatgaaattcatcagtaaagtcagaaacgttaaagtatttattatgtaaaagagatactaatttatgatcaacgtctgatctttgggtgccttttcctgataaatagtattcagaaacattaagcgcatgtgcaagtttactcattgtttggggagatggatagttaacaccactttcatattttgcaattgtgcctctggagatgtttaatcctttttcatttgatagataatcggagagttgggcttgagttttatccattttttctctgatttctttaattctaggtaataccataaaaatcctcccttaaatattcttcataattataacatgctctataaactaaggagctaaaaatatttatttagctattgaaaaggagcaaacaaaatgatataactatttatgtagaaaggagcataaatataaatagttcatcgttataaggagcaaataatgtatatgctctaaagtgtagaacataaggaggttccacatggcacaagataatacaacaaaacaaggtgaattgctttccacctttaatgagagcaacagtaagagaactccgattcaatcggctttaactcgaccattagaggaagctatcggtaaatgcttcttgttactaagcggaacaacagaagaagtccaagattctaatgatgaaagtaaaactattccgcgtgcagtatataaagtacgagttgtaagttctaatacaagactagcaattggtactgtgttaaccgtgaaagttaagggaagcaaaagtgtaattactgatgatgaaaataaaaaatttttgtttggtttagagaaaaataaggtagttgcctttgatgatcttagtcattggaattttaacggaaatgaggggctatctgcgtcaaatattagaattttggaagtcagtcctcaagaagctatgaacttataagggctaggaagtgattttgtgaaaactaagagactagtattagatacaaaaaagccgctaggtaatcctagcgggctaaaaatggcagaaggagtaaccttattgttatcaattgcagttgagtataaggttgcgcctaacttgttaagcacgggcaattacacagctcttgcttatccatttttagtaaatattatacccttagggtatccatgttggaagtggattaatcttcatattattaactataaaatctataagcgattaatgagcatcattcattctgaacaacttatagattatgcagataaaaaagaaacaacaacttttaatgaacgaaaagttgaatatggcgtcaagattatctatgaagaaacatcagaaggtatatacattactgtatatcctaatggcataaagcatagtgatgctacacaaacgctaaatagcaggctagaggagaccttcaacatgaatgtcttatcagtagatcaccaattatcttatacaagatacttgttaagagatattgataagcaacaaatgaaggttatggatgatgtgttttagttttaatattcaactagataaaaatactagttttagtcttaagggctcaggaggtcttctgatagtcggtcgtagtgggtcaggcaaaactaacactacgacttatattatgcttaaggctgtctctcaatgtgattgcggattatacattattgatgctaaaagagctgatatgtatggacttcatcaatttttaaaagatggcaagaaagtagtagcaagtacaacaaatcaaatagcacggctattgcgtgtcattaacgagaatatgagtgcaagatatgagcacttcaaaaatggaaaatggggacaagatttctcagaatatgggtatcgaccttatctattagtcattgatgaagtatcagctatgcttgctgaagctggtaagaataaaaaagagataatgggtgaattacgtcagattattctgcgaggtcgacaggctggaatctttacacttatctctggtcaaagaattgatgcaaccattttagatcgtgatattacattgcaattaggcacacgaatcgttatgggacaagcagactcggaaacttatcgtatggcttatccaatggtgaatgatattaaagcattaccattagttccaaataaaccgggttatggtcttatctattctgatggacaaaagattagcaatcctactccgtttgtgtcacctgatatgtctaatattgatgtacctaaggtaattacccgactggaaaataattatgactcgtctaagtataatgatgagtctgattattggcaattatagttattttagttgccagctgacgggggacggagtcacccgaatggaatgttcaagcgtgagcgggctggcaacacccacttaataatatgggtgtaacggaaagattattaatcatggaaacgatgaataatattaaaattgatcaacttcgtctaaatattccatatgatgaaatctatcaagtagaaaatagtcaaagtttacccaaagaagttatagtagctgataatctgctgcatctggcatggttgtttaagtctaatacagtgagtcatggacataatggctatacttcttcatataatttcggttcaggagaacaaggcggaaatatttccgtaatgtggaacgagtcaagaaaagatatgggaatactagtcgactttactgcgacaggcaaagcgctatatgaaagccttgctgaattacatggaattcctgttaattggaagaaaataattgaagaattatatgaaaaaatggggcatatatcgaggctagatatagctactgaccttattaattatggtttttcagttaacgaaattattcaaaggttaaagaatgaagaatcatttttcttgaatactcaaggaaataaaatcaatgctaatcgatttaagataattggaagctatagtgaagctcagactctatatatcggtagtagaaaaagtgatgcttttctgagaatttatgataaaaaagttgaacaggatcgagccgatggactctatagaaacttggctagaaactgtaacgattggataagagtagaagcagaatttaaacaccgtttagctaaagaactaggaaaatatattacaacattaactgcagataatatttatccttatttacttggctgtgtactagaacgttggtcattagttgatagggaagaataatgacatatgaaaaattccaatattctaaagaatggaagattttaaaagagttatcgaaaggacaaggacttcaagaactaaaacaagctcaagttgacgcttccctgaatagaaaaattaattagttcttgtatggtggtgccagtggagttattacgttgattaaagaaatttatggtgatgaagcactaaaaaagttttatcaatttttagattattttatttctaatcctgatacgttaggacattactaccactcggacaagataaaggcggatactaaaactattgcagattctacgcaaggcttgaactttggagaatatttagaagacttaaagagagaattagttgagggagataaacagaaaggcaggggctaatatgtttggcacagagttactcaacgctagacaaatagcagaagaattaggtattagctatacttacttttttaaattaattaaaaatgggtgtccttatcatcaacttggagaccaaggacgtaaatattacgttttaaaggaagtacaagagtggctattagtaagtagccaacattaattagaagacgtagcaacttgctacgcttttttaggagaaagctatgtcaattacacaaattaaaacggggaaaaataaaggaaaataccgtgttagaattcaacctactgataatgaaacaggtaaaactattccgattcctagtaaagtaacaaaaactagcagtaagcgtgaagcaaaacaattagaagaacaaatgtgggtgcaatatcgcgcgcataaagaaatgaatttaaatgtattagatcaaccacttgcaaaagctttagatcactatgtagaagaagaaagaagttcggggcgttggtcatcgattactacgtatgataattggaaatatacggttaagcttgtttctcaatatttcggaaagaaaaaagttaaagatatcaaagaaaaagatatgcgtagttttgctagaaattacataagtacacataaagcaactgtggcacctcattcaacgctagatagacagttacaaaatttaaggagttattttgctactttgaaggaatatggtgtcttaaagaatcctattcctatgaagccattaactaagttttttagacgtgatgaaatgaatgcccctgttaagaaatatgttttcactaataatgaaattaatgttcttaaagatagaatttatagagagcttggagtaacaagaataagttattggacaactagaattgctatcttgatagctctagatactggaatgagacctcaagaaattcaggctttaaagtggagtcaaattactaatgatggaagttttaaagtttttagaataaatgactcatggaatgaaaaagagaagcatcttaacggacatttgaaaagtcgaccgcatggagaatctagactaacccttcccctttctgaaccacttttgcagttattgaataagtttcgtcattgtcagttagaacttttaaaggagaatggtttaactaattttaatgatcgaattttattgaacatcacagattatcacttgtgcgcattagggtatccaataactcaaaaaagtatgaatgatatgttgaaacagttgagtaagaaagtaggggttaataatcaaaatttaaatataagtatgtatacttgtcgtcatactgtagcaacaaaattagggaatacaccaggcatgtcttacccttgggcggcaagcagattagggcattctttaaagatgtttatgcggacatatgtacatgttgatgaagatcgaaatgaagaaatgcttagattgatagctaaaagataaaagaaaaatgcaaaaataacttatatttgataaaaaaatgaattaatgtagcaatagcaagaatttgaaaataataaataacaaataatttttaacattttatagattttgaaaaaaaaagagcgtatactcagggcatcataaagagatgtgaaggagaaatcaaaatggttattgtagaacaaaagtttaataaatataatcatacaagcaacatggatgctatggagtacgctgcaggatgttgcacatgtacaacaacaagttgtacaacttcatgtgccgctgtagctgaaagttaatggatagttggcgctgtaaattatattacagtgctttttttaggagtataaatactgttatgtgtctattaagaataaaagacttaaaagttaattttaaggatcaaacagtactggattttagaggtcatgatatagagataaagtcaggagacaaagtagctctaattggaaaaaatggggcaggaaaaagtacactattaaattgtcttttacatgaagtaaaatacactggctgtataaaggagaagtatcatcagtcggatataggagtagtttttcaagaaaatgtatattttaaattcttgaaagtttatgaaatctttgaattagtgtggaataaacctaaaaagttaattttaaaatctaaatttattaagaattttaatttagcaagcattatgaataaatacatttctgacttatctggtggtgaaaaacagagattaacaatagctttggttttttctcaaaataaaaagatttacttactagatgaaataaattccggcttagattatgataacaggcatgaattaagtaaaatcataaataatattactgaagaaaaaacagtaatacaaataagtcattattttgaagaagttgaaaattgggctaataaattgataatccttgatagaggcaagatgatatattttggaagcttatctaagttttattctataaataagcatgattcattaattattataaatgataaaaaaagcctatctagactgacccagaagcctttaaatctttatagtaataaatatattgtatctagtagtattgatgagagacatgatataacaaatttattagagcaacaaaagatagattataaagtggtgccacaaaatttatacacaacttataaattagcattagtaaaacatgaggataggtaaaataatggctagagaaattttattaagtttaaaagcacaacttagagttccaattgctgtatttttttctattttttttccaattattatgatgattatgatgatgacatcttacggtaatttttcattaagaaatggatatcactttatagataagtatttttttattagtactactataggtattctacctctaaccttaattagttttcctattgatataaataatttgcttgaaactaagcattacttgcgtttgaaatacttaaatgttgatttaaaaaaattatttttatcaaatattatttcttatttgataattgtatttatttcagttggaataaatttaatagtaggaaaaagtatatataatttaagattacctagtatagagtatttatgttatttttttattcaattattctattgtgcgatagttctacttatatttggcttactgttaagtttaatagtatcagatatcaaagctttaatgcctgtaggaatgactataatgtttatattatttatggttataggtgtttttgtacagtatagctccttaccgaaaattatacgtactatttctagctacataccagtaaaatatttggcaaatgatttctattatatctggattggtcaggctaaatggaatatgccattttttaaatgtaatacgatctggcttatttttctgtgtttgatttgttacataatttatagaaggaagaataatgttacgaagattttcaactagtaaggatttaagaattgggatagagataatagttggaatcactttatcatttatcattaattttataatgatttcaattgggtatgccattacaaatagtgaaaaattaaaagaatattcggtcaattattttggattagtcatatataaaataaagaattatggaaataaaggtataccagtttccaataatatgatgtttatcggaatagttttaacaataatatttgtttttattgtagagtgggttgtatataagagggataagaatggtagagtatgagcttaaaggattatttaatcaaaatacgctttcaacatcagatattagtaataataataattacaataatcaacaattatttgatcatattataagaggaaatgctaattctgagatgctgacatacttacttaatatgaaccatcagcgattgaatgattttaagagtatgcatcaatataattatggaaattttgcatccttaatgaacagtgtagaacagtataacgaaatagaaaatgatgaaactattttgctacctaagccattgagaataaaaaataagttacagcaggttctaaagaaaagaaaaagtgttagaaattatataggcttatcatgtgatttacgagaattgtccacaatattgatgtattcatttggaatctcgggaagaaaagagaattttggtggaatagtcgcaagtatgcgatattacgcttctggaggtgctctatatccaatttcagtgattatatatataaataaggtggatggattgaaaaaggggctgtatttatatcagccaatgtatcattccttattaccactaaatattaaaactcaaatcgatattaataaattatttgtaggaagtaacattgatgttaaaaatagtagcttttttgtattttataaatatgcgattagttctacatatttaaaatatggtgagctatctttagctaatattttgattgaagcgggaatgatggcgcaaaatttttccttagtaactacagcatgtggttttgggtcatgtccaattgcaggatataacaaaagatttattgaagatatttgtaatttagatcatgttaatgagcatataatttttactgaaagttgtgggagaaatgaatagcgatacgattttttttgtaaaaaaagatacacatattaattctaatataaacgaatggatattaagtaagggaataattcataaaagcactttaacaataagtaaaaatgaaagtagtactttgtttgtaagtttattcaagcaattaatacaaaatcaggaaattaaagttagtgaagatgatgaagagtattcagacttaaaaaaacttgttcagcttggatttttaggaataagaaataaaaataaaaaagtagcacttattgtggaagaaagtgcaaaaaacttctttgaaaactatttaaaagatgaaaatatatgtgttagctcattagatgagtttataactcaagatacattaaatattttaattgaagaaaaaaataatactaaattaaataaaatagttcaaaactataaaaataaatacaaagatgtagatttgatttttgtttgttctttgtattatgaaaattatttaaaaggaatcaacaagctaactaaattaattagtatcccatataatataggattttatgataataataatatatttgctactagaataatacatggagagactggctgctatcaatgtcttgaaaatcaaatactacaaaaatttgatggatatatcgaagattatgtatcagaaatggattctgaaaaacaagtatttgatataaaaaattatggagtattaatatctataattaagtcagagatagaagaactaaatttatactctgatacagagctacgaggaaatgttcttcatttttatttacctacttatgaatacaattttgataagaatagaattcaaagtgattgctcagtttgttctactataaataatattttatttaaagaacaaaatatgaaagcgtgcaatattttagccgaggttttaggtaatgataaatatcaagaataatttagaatataatttattgcgtcaacggatcttgggtggcgctataactggaatctggaaaaaggatactttctttattggcgaaagttcgtatccggtaatgaattataattatattactgcaaactttactaattttgaaaaattcgcttttcctggctatgttcccccgattaattatcatcttagtggctacggcttatcttataataaagctttatcggcttttctaggtgaaagtacagaaagatattctttttcagtcttatatcaaaacattaagcataatatcatttattctgattatcaaaatcttcagaaaaagtattctaattgttatatagtacctttaaattatattaatatttatttttcaaaagaagataaagaaaattatataactaaaaaagatccaataagatggatagcattaaattcactatttgatattaataaaaaggtactagttccgcttcagttttatattatgtataccaacagtatatttaaaaatgaaaaaagaattgtaaatagtgctacatcaacaggaactgcttcgcaagaaagctttgataaaagtctggaaaatgccatagttgagttcttacaaatagattcttttaatctttggtggtatggaggtctaagaggtaaaaatttaaatattgatacagaaggcttattaaaggaattgttcccaaacaataatagactttggatgtttttaaaaaaatttacggttaattttatagatattagttttgacaaagcaattaatgtagttgtttgcgaaattaccagtaatagtgatagtaaactacctaaatatgtagtaggagttcaaggaggattttgtttaaataagtgtattgaacgatccttttttgaatgtgtaactgttttagaatattgttttactcaaagttgggttgaaggttctaaatttaaaaagatttctacaaatatagatgatttaaatgtaaataatttagacgataatgtattgttttatgctaaaaatggaaagcctaaattaatcaaaaaagagaatattttaagagtgtccaaaaaggttactaatttaaaagatttgcttttgaatttaaagagcatctctaagtatgcaggatatttaaatattacgcctccagaatttagaaatcaaaactttgaaatatgtagagtatttataccagagcttttaccaatttctttaccgtcttatccgccttattatcatccaagatacagtaaaataggaggtattattaataatgtcccccatcctttggcttaaaatagcttttttcatcactttgtttccaggcggaatatatttgataataagaagaatattgtccagccatagaaaaagcatgacagtatatttaataaccttggtaattgtagctattgtaaataccattattttaaagatcaattttaataggtatattgaaatcatcttaatattgattattccttttacgtattatttttttgagtatgttataaggtataaaagattcaatatcttaagttttaaggctaataaaacaattatttatgttttagttttttttcctatatttgaagaagttgtttaccgtttctttatatttaaatattgttcggttttaggcttttctggaatacaggctatgatatttgcaacgttatgctttgaattttcgcacatatattatttaggctttaaagctattaataaattatttttttcctttattcaaagtatgttgtttttggtttttcaaagtttattgttaataatatgtttacacataatttttaatttatatgtgtatttacacaaaaaagatatgtataaagttattttttgatattgacttgtattacgtatataacaatatgtgccacacggtttctagaaaaatcctaaagagtgctaattttaaaagcaaaaattgttaagccttttacgcttctagtcagcattagaaatacgtttaagtctttcaaataagttcaatgaagcttgatttgaaaggcttttttgctactttgaactagaatgaaattctttgaaataataaggatttatttgaaattaacacaattcaaacacacagatacgattcatgtgttaagaatgtgcttgaaggaaaattaagagtactaaatatagtgatttaacaggcgttggagcctgttttttttgtgtttggttagggcattttgtttaaattaaattcagtggatttttgtgcaaaaaaatagccatattgtagggttatacatattgactattttctattattaaaattatttcaattcagccacaaacctaattccttgataagaaggaaacttgtaattatcccatgaaaaataagtgtctggaaattagttctttctatttaatctcaatgctatttcaagttagctattaatctgtatcctaagaatccattgctagattttggattccaagcaatacctacaccaatttttgtatattgaccagataaaagaatgtctctatgtccccaattagatcctgcatcatgataaatgaaattatttaagcaaatttttgcttgtgtagatggggtatcagtattatcaactgcacctccagcaagcacttctgcgtattgagtgcggcttccgtctggccttgtatggctaaaacttgtatttgcttcggtagctctagtccttgcatattcttgcagagaagtatcaagtgttaaagaatttagtccctttgattgacgtaattgatttaattgcgcaataaattcttgttctaatttggtagcaaaatcagaatccttaatgtttgtatattcattattgggttttgtatttgtggtttcattatgcttaataaaattgcttgaattagcactttgagtatttgtttcatcggatgtacttttagtaatagcagatgttttagaagtgtcaggttctgaaactttgtgagttaattctgaactaatccatttgttagttccaactttgtaccatgttttaccacggctatccttcttttctgcataaacatataagtattttttaccatgaattattttagtgcggtaagcttttacacttctgcctttcttgagtgttcttgctcctttaatacgcttgcctttatagttgtaaacataagcattgtgagtaagtcttacgctgttagtgcttgcttctactacattggcttgttcgttgccagcaacaactgtagctgaaagcaatagagctgatgaaagcgtaatggttgatagtaatttagtaacgtttttcttttgtaacatggtagttacctcctatattccttatttcagattagcaataagactgtaccctaaaaatccgttacttaatacgggatcgaaagcaaatccaactccaatttttgtatattgactagataaaagaatgtctctatgtccccaattagagcctgcatcatgatagatgaagcttctcaattgttggctggcttcttgctctggtgtacttgtgtcgttaactgttcctcctgcaagtacttctgcatattgagttctacttccatcgggtctaatatggtcaaatttagtattggcttcattagctctggttactgcataagattgaagtgtattatctatgcttaatggcgctaacccattggatctacgtaattcatttaattgagttacaaaagattgttcagtttcatttgcaaagtttgagtttatgaatttgaatacgtctgttcatttgaagccgaattattatcttgttgagtaatactttgtgaatctgctttttgacagtttttggaactatttctttttgtataaaatttatcagtgtcagtagcaagtatccatttgttatcaccaattttataccaaattttatcgttaactttttcttgagcataaacttttacagattgtccgactccaatgtattcgccagtaggtgattgattgggagctttatatgtttcacccaatccattatctgtaatttttgcagtgaacaaataatttgattttgtgttttgcacatttgcgagcctgatatagtgatgactaccaatgtataaatattttgtgccacgtattttcttagtgcgataggcttttacatatttgccttttttgagtaatttaacacctctaatacggttgcctttgtagttatagacataagcattatgcgtaagtcttacatttttagtgcttgcttccactacattagcttgttcgttacttgtaacaactgtagctgaaagcaatagagtggatgaaagtgtaatggtcgatagtaatttaacaacttttttcttttgtaacatattagttacctcctacggatattcattatttcaatttctaaattaatgatacatgatgtgaaaatgcatttcactgctgtttttctttgctggaattatatttatctctcgtaaatttataaaaaagtaaaagattgaaaagttaggtgcatcatttaatacaaaatataaactgaaatagattctcgttgaatttggagactgtaaaatagtttgtgtaaggatgaatgattccttaaatttatttctttaaacattagaaaaaggagttcctttctcgtatgattggtttgaacaaaaaaacacatacagaaagaagaactccttcatgaatgattttaccaaagattttgctcaagctctattcaatccagacaaaataaatgatttattgcgcaaagagctacaacaggctgttaataacttgttagaagctgaattgactgcctttctgggctatgatccctatgccagaaatggctggaatactggcaactctagaaatggtgcttatttccgcaaagttgatacgcaatttggcccaattgaagtgcaagtgccccgggatcgcaacggttaatttcatcagcacacgctgcctggctacaagcagcactcggatatcttggaaagcatgattatcaagctttactccaagggcgtgaccaccagggaaatagccgatctaattgaaaagatgtatggcagccattacagtccagctcaggtatcaaatatttccaagcagatgattccaaaggttgaggcttaccacaaacgcaagctaagcgacaagtttttctgcgtctatttggatgcgacataccttcctttgcgccgagaaacatttgagcgtgaagcagtctatattgccattggcatcaagcctaatgggcacaaggaggtcattgactactgcattgcacctagcgagaacattgaagtctggacagatatgcttcaaaacatgaaatcccgaggcttaaagcaagttgagctttttctttctgatggtgttgttggcatgaaaacagccttggccaggacttatcctaaagctcattttcaacgctgtttggttcatgtcatgcgcaatatctgcgctaaagtacgcgtcgacgatcgtgaaaagatcatgaacgaattcaaacaggtgcatcaacagacaaacaaagaagaagccacagctgtcctgcatgacttctataccaaatggggcaaggtttacagccatgttatcagaagcttgaaagacatagaaccagatctgctggtcttttataactatcccaagcagatcagagcttcaatttattcgactaacatgattgaatcatttaacaatgtgatcaagcgcaaagctaagcctaaggcagagtttccaactgaacagtcgcttgatgcttttattggcattcaggcaatgagctacaatgaccgttatttcaatcgaattcataaaggctttggtcaggttcaggacaccttagaatcctactttgattaaataaataattacttaaacttcccacatcaaataagctggcaattctttgatattgcttagctttgggcttctatactatttttgctagttttctttaacaatttttgcatgtatttgggtaaacgattgataaagtcagccgtgaattctgctatttgtgcttcactggcatgaaagactttttcaacgctagccaccattgcttttgtgattagctgaagtgaatgactgaatgtaatatccgccagctcatcaatcatgcaatagaaaagctcacctaaggttcgctcatcttcgtcgtcccgcttggctactgacatgagcatatagcgggtaaagactatagccacatgagcagtcaaggcatcgtaggacagaccatgatattccgtgcttagttttaggtagcttttgcaggttttgaaaaaaacttcaatatcccagcgtttgccataattgcgaatgacttcatcttcgctaagcgacatgtcggtacaaataatagccagccactctttacgattggcacggtttctaacgcaaattatccgagcgtcaattttagcaccgtctttgtcttggcggccaaccttgactggaattgacaacagatagcgcgaacgcccgcgtcgctttttacagctacgataaatctgtttgatgtttttgcgttctccttcaaattcatatttgattttggagctaactttaaccatggcaattacatccagcttcctttgcttgagctggacgatttgatgtggatttgagaaccagctgtcaaacagcacgtacttggcttgatgacctgctttcatagcttggtcgattaaattaaccatcacgtctgtgcctttagtccgggcaagcatgcgtcttttgccagcaatggtgcgctgatcacagactttgttttcgccaatcatattctgtagcttgtgagaggacagcaacaccgaattgattggcatgaaagaagctccatcagtccagcccagggtcatcatgcgaaaacctttcttgtaagtcattgatacatggtcaaaaactttggcgactaattctgttttcttgaagccggtcctagagaagtaggaatcatcgacaacaaagcaatcagcccgtttttctgaagtcaaagatcgcaagtgattattaatgatttgcgcagaaagcagtgtggtgaagtggagccaattgacgtggacgttgcgcataaatcggtaataagaatttttagaaaagctttctttaaaatgatccgttttcagctgcatatataagctgcggtcacgaaagacattgcttaaaacgtaaagaaacaagctgaacaggctaatgcctttttccttgcggaagccacattttctcaacagcttgatcacctgaaacttcttgatgaagctgatgattgagtttgaaaatagttgttcatttttttggtcaggagatggtaaaatagacattggcacaagcctttcatgcatagaattatcgtttggtcactttaattatagcaatgaaaaggtcatgtgccttttatatttgttaaaaaacgcagaatcacaataaaaggagcgattctgcgtgtgggaagtttaagtaattaaaaaatcaatttacgagaaagaactatttacacaaaagatttgacagtttctgaatttgacaagcaatatacagaaattatcaataaaaagtacgttttgctataccttttcataaacctgactacaatgagagttgaagaaggcgtttttgtatgacaaaagaatatgaaaaagaagtcaaagaagcagaaagcgtattggaggaccaaaagttaactgatagtgagatttcacaagaattgatttccaaagataatccaactgaaaatgtaaaaccatctgagattgatttcttgcgtaaaaagccaaatttgacaacgcaaattgatttcactttgttagctgatcttgctgggttatccaaggaagctaaggcagaagcggctgtatagataaaaattttacgtagaaaaagaagtcaaagaagcagaaagcgtattggaggaccaaaagttaactgatagtgagatttcacaagaattgatttccaaagataatccaactgaaaatgtaaaaccatctgagattgatttcttgcgtaaaaagccaaatttgacaacgcaaattgatttcactttgttagctgatcttgctgggttatccaaggaagctaaggcagaagcggctgtatagataaaaattttacgtagaaaaaagaccggtttgaaccgatctttatcttataaaaatttactttaggagcgtttgtgaaacttagctactccccaactgattagatagaaagtcgaaatcaaaatgaattgaatttttaattctaaaatgaatagtggaaagtaaaataaaacggaaaacaatagaataatagcgtaaattccttcgaatgttagaaataatctgtttctttttctatttttaagtgttgctagtatcattttttcattcacaaagatccctcctaaaaattatgaaattaagaccaacttaaataaggaatagtccatcggataggaacacctaggagccaatgtccggagctgagaaaagtgttttttaacacaacggtagtaacaattgcaataactgcgagtactaccaataagattagtaatgtactttgtttaatttttgacatgattaatgcatcctcctaatattttttaaacttctattattttgctgggataatgaccggtaattgccaccacattactgtagcctcctcccttttttaatcatttagtcggtttggttaaatactactccttagtgactagaacagattaattttgtatcacatagtttacaaattatttgggccaagttttaattaaatcttgataaccatatttttgtacttcatttctaattttttgcgcttcctctttattgtttaaaaataaattctttaaatataaagcagcaatcttataaagcaaaaaatgtatggttggttttgattccatgatgtagtcaattatttttggaacatgcattaattgaagtgattttttagaaagttttctattatagcaaaccgctagataattctcgaagacacgcaagtatctttcttgttctaattcggagatatttttattgcttttcatctcgttaagtagtctattgataaaaaatgcaagggtatcttgttcccagagcggcattgtattagtaaaaagtcgcagtaattcaggattagtcatccagttttgtccttcgttaaattcaatgaatagatctttttttattttgggatcgatttgatttaatttattttttaaatatgctacagaaatcatagctcttaattttaaaatcttagagtgagattgtgacagaatttcttgatagcatgattcaatttcatcaatttttcctacattgaaggcttgttccattttattatttaaatctgattcaatctttttttgctttgaagtataggttgctcgcaataattggtaaaagtaagtaatatcaacatcatgttcaaaaagaatcgcggctaatttatctgcactaattctgctttttcccgcttctactttcgcataaaaaggccgagtaacaatgttagcagccatttctttttgagtgaggtctagattttgtctaatttttcgtagtgcttgtccaatagtcataaaaaatcctttactctaaaatattttcttctctacgatatatgattattataaatgatgaaaatataagcggataaattaaagagaactatggatatcggaacggcattaagacatttgagagatgatctaggtttgacacaaaagcaaatgattcaggggacgaaaataactgttagtcactattctaaattagagaagggacaaaacaggatatttatcgaaaacctagtcgagatattgaagcaacgaaatatttctttatcatattttgttgatcactatcttaatgatgaaaatagtgaaaaagaagtaaattattcagaaatattaaatattgctttttacgaaaaagataagatcgctgctgaagaaataaaacgacaaattttttcagataagagttctagcaatgaattgagagatagagcaacattaattgtggatatgatagacaaccagggacagagtaatgttgatgctcgaatcattaattctattttcaaacatgacaactggactcagtatgacgaggcaataatattattgggtaatattattagaactagtaatgtattaaatatgagtcctttggtattgactctaattagaaaatataaagatctagataaagaaaaaatcgaaaaacaaagaaggttagcaacggttggaattaattatttatttaattttcgaaagttaagtaaagagtttaataaaactgtgctaaaaattataagctggattaaaacaacatcgattgttcctgagttaggcattattcgagaattaaatgcatattttttagcagtttatgaaggaaacatttctgtctcaactaatatcaaaaatgtccttaaaatatcaggttatcaaaatcttgctaatgatttacctaattaatcccctgagaggggattgagttgctgtggaatgagaagtagataaaatcatagttaattaaatatgaaagagaggcatagtaatttgattattgttagttatccagttttacctgaataactctgagttcatacagtacgaggagatataaattatgaaaaaaagattttgttaagcctaagtttagtagtattaggaaatactttgttttttaattcgagtgtagcttctgcagcgactaataatagatattccgtaaataatacaattcgtcaggcacctaatactggcgatgttcctggtggatggggcattactcctggtcatacacattggggctaagtgatagaagcgatgaatgaattttcattgctctttttattttgggatgcgaattttatgaagaaaagtaaaatcatatttttaatagagcttgtattaaatattattgctgctgtttttctagtaataaataattcattcaaaaatttattagatgtaggcgttgtatttttactacttctattgcttatttggaattttttaagaagaaaaattgagattagtttaaaactatcatggctcaatcttatgatattaccagcaatttttacttattgcttaaatactgtagctaatgttttattggtaaaatatcctgttaaaagtgttttaatagctataatttatagtttgttattcttagtttatttgcttccggtagtaattactaatgcgggattggttaagaataagtatgctagagtttttattgcaatgtattatattgtgctattactttttagcgaaaacttacatatgaatgactacttatcatcctttgtaaattggtctcactctgaaattcttaatgggttagcgttaattccaatcatattttgcttatttaaaagttgggatattcgagcaaagcttaatcttaaatttaggcgatattcaaatatacagttaatagttttattagtagctgtattctttgctgcttggtattccttctttcatagctatgtttatattgcaccaactttttcgcaattattttggaattgggacttctcggaaattatcccaactgaacgagctgttttatggagtttaggagcgattttattcgaagaaggattccggtatctattaataattgtattgcttgaagtttttaaagtgcaaaggggtcaaattgactattttcttgagtgcgctattttttggattgatacattatgccggactacttgaccaaggcccaatatttataatttcaacgcaagcaatttttgcttttggttatggctgctttttggcgacactgtacttatattctggaaaattctggttagtattgctttcacatttttcattagatcttattgcattctcgctttctgcaggtggtggcggaatactatcatggtatggcaataatgatctcttgagtaatggtttgagcatggtttttgctttagttatgacattgattatgtttttaggtaaacaaaggaaaattatgcaagaaaatgctgctagattaattaatgcatgatgcatttaagatggtcgaaagatcatcttttttatgcaataaagtgtcatatataattgacacctactataaaagttgctattattttaaaaacgtcacatataaatgacatctaactagatgaataaagaagaattcaatgaatcgagtaagagaatatcgtaagcaaaagcaaatatcacaaatggagcttgctagacgaataggggtggcaaggcaaaccattaatttgattgagaatgataagtataatccatcgttagaattatgcctaaacttggcgcatgcattaggaacggatttgaatactttgttttgggatggggatgaagcaaaatgagacgagaaagtttatggcttaagtttgtcagatattggtatggcattgatagtaaattagacgagcggcaattagcagaggttgaacgaatcggtaataatgcctatgtaatctctggtatagtggaactgatcttactggttatcacgctaattatggcattgactattaaaagtgagctggctttgtggtttttacctttggcgattgcaattatgatgctgatgatgagtgcttatacttatttgacaatgcgaaaatttaaaatattctctgtcgaaattacagcagatgaacgccccaaagcaattcgtagaatatggataaaggctataatagcgggaataattggtgcagtttttggtacattaggtagcgcgctaggagcttcttctgtgcaaaataatctagtaaatgtgcttgatttttggccacaaggtttatggctaggcgtatgttgcggtgctggtagtgcgattggaagagtgcaacgattgaaagtaattaaagaagacgaataagcgaatcgaaagtagtcgatccgctttttttgctgaaaaactatataattaaagtaacaataaaatttacagcaaggcaaaaaggatgaaaaaacaaaataagactggctcaattggcgtagtgggtgccacggccatcggtgttggtggcatgatgggagcaggcctatatacattgctcggcttggccgccaactctgctggtgtttggctgccagtatcatttctaattggaggcattgtggccgcattttcagtttattcgtattcaaagttaggaatgaagtatccagatcgaggcggtgccgctaagtttttgctaaaagaattcggagatggcctgctagctggtgggatgaacgtcttccagtatatcggctggattatcgccatggcgttatatgcgaccggatttgcggaatatgcctgccaactattgggaaaatcaagctcaggctggctaggtaaggcaatcagtatcggaattgtcatcgtggttgtggcaattaatattatgggttcaaagcaagtggcacgtgcgcaaacggcaattattgcgtttgaattgttaatcttactgtcttttgtagcggtaggtttaactaagctgcatgtgccgacaattactagttcaaatagcggcaatattgtaggtatcctatctgctgcgggtttactttacgtaacttatgaaggttttggcgtagttactaacgctgcagggagtatggtaaatcctaaaaagcagttgccacaagcgctgttcttttcattagggatcgtcatggtgatttacattgtagctagtgtagtcgtggtgatgaccttaggcgttcaaggcgcagtagctaatcaaggccacgttttggcaacggctggtaagctagtattaggcaactggggtctgttcatcacttcactgattgtctgcatcttcgttgtgattttcccattatcagctgttggtgagatggccagcctagcctttttattggtgtatgccatggttaacttaggccacttgcgcattgcaggacaaactggggccaagcgctggattttgatttgctctgttgtattgaatctagctttgtttgctttgttgtttattcagacaattctcaaccacgaaactttaacttggatttcagtaattgctttgttaattattagttttttagttgaacttgcttggcgaaaaaagaataaacgcaacctgcattgattaggaaaaaaatagtaatttatgatacaaaaagtcgacttttgttccacttattgggtacaaaagtcggctttttgtttttttcgttgtcaaaacaatatctttaatattttaattcagatatactctctttgatcaagtttgaagtgagggaaaatgaatgaaaaagttattgatcggaagcgcagtcttagctgccttattaattaaagaaaatatcgcagtaaatgcggcaatagagcaaaacgaaacaacgcctaagattgcagttactgacaaaaaagagaagccaaaagaccagtctgataatagttttgcaggtcattatgaccaagagacaaattttattacctgggaaataaggctgaatcccaagaaagaaaaatatactggtgatttgaagttggaaaatttaattccagaaggcttagttctagatccagatacgattgaagtaattaagaatgataattttattcaaaattctagtttagttaaattgaagaaaaacaaattaacagctgaatttcctgctaagaagtattcagagagcacaattttgattaagtatcgaaccaaggtggaagcagagcctaatgagcctaattatcttcgggtgagtcagtcctttactttgggcgatgatcgagttcaagaatacgagcaagaaattaaatacgatcgaagtaataagaattttaacattgaagcgccacataaatctacgtttagagatgataatcaaatttcgttaattaaaaaatctaaaagtaatgaagaacgctctgaagattggcttaaacgtctagcagagctgattattaataaaaaagaaactacttcagataaaggaggtgaaaaagttcaaggacaggtcaaagatcaaaagcagcaagcttccccagaaaatacaaacctttcacgcactccaactgtcaaaggcttgactggttttgatactaaggctaacgaggtaaaatccacagctaaaatagattctgattcagtaaaaactactctagataaagacgagattaaggacaatgcaagtactatctcgcctaagtcgcaaaaacacgatactcatgtcacactccctaaaagtgacacatcagaaactaaggcaaaattacctaaagctggtgaaactgccggtgttatgctcagcgtattgggcataattttaataattgcagggtggacagttcgaacaaaattcttaaaataatctatatttgtactaaaatacggattttcaatagccaaaatagactctttcacgtattatttagatagataaacttgtatcatgaaagagaaacaaacatgccgtacactatttcagaaattattgttttattttttacttattcagttatcggctggctttgggaaaccttttattgttcgatcaaagaccaccattatgattatcggggatttctgtttggtccttactgccccgtatatgggttcgccgttactacaattttaatttgtaccaaagacgtgcgagataacctgctccttttatttatagtagggactatcgttgccactattttcgaatttgtggctagttggctattagagacaatctttcacatgaagctttggaattattcaaaattatggggtaacattcaaggtcgagtggccccaatgatttcattattttggggcgttggtgtagttttattagtaaaatttattcagccaatcattcagaagctcattaataatgaagaaaagataactcatggctggctagctgtgggtattaccattgttatgggtattgacttagtattaacagtaatcagtgtcgagagattccatactacaactaagatgtgggatgtgcatattaaccactttattgagcgagttagaactaaagtagaaagtcatatgcctgagaaaggaaaattgcgggttggtgattggcaccactcagtgatgcagcactatgatgaattacaaccgcaacgattaagctggaatcataagcgctacttgaagagctttccaaaattaaaagttactgatgctcctaagttcatggaaattaagaaagaagtcttgaagaaagaaagctaactaacataatcttattttgtgggattgaaaaaagtcggatgatcatattaggtcatccgactttttcttatccattaattctatttggttcacgttttttactttttatttcggtgtagttatctaaaacgttggcatagcgtccaagggtgaaaaggtaatcagataatcgattgaggtattttaatacgtcatctgataattcctgttcatttaaacttaatttgaccaatataatagcaacaccatcaactcctgaaactactgaagaagaacatctgacagtaaaagatcatgtgggttcatcaactttaagaagaggattaccacaaactggtgaaaagaaatctactttgaatgcaggctttgcccttgctggcataggcttggctttgcttgcagggatgttgtttgatcctaaaaagaagcactaatactgaataagaattaagttcgttaaagatcgaatcattttgggttcgatcttttttagtaacaaaatttaaaaaatcccaccttcgtgaataattgaatactttatatatttcaatcgtccactttagtgggattgtattaattcaggatgatctttttgaatttcctgtttttgaagggcagaccaagtccatggaagagttttttagtcgcctagaaactataggcaaggcttggcataaagcctatgataccattgattccgatacagatagagtcattaagagaactaaaatggatgctcgtactacgttagacctactagaacatctatcacctgtacagttctcttgaagagaaaaagaatatcagcacgtcaccagtatggttcttagactatgatcaaaaaatttattgtactgatgatgccatcattggtcagatgcttcaaaccattaatcatgacattacccgacgcagcagtcgtagcttattacactggaaaattcttaaacaaaattgttccagaaatttttatttttgatggatgttattttttgcttggttctaagcgattttatttatcaaagctaatagttctatgttatattataagtgttataataatgtaaaaattattaagcattgaaatatagtgcattatgatacgaggagaaagatcatgttagaaagagtcccaaaatatacactaagaaaactgtcagttggcttggcctcagtgatgattggatcaggaatactgatgaactctccaaaggtacttgctgatactattaacccaaatgaaggtactagtactgctgttcaaccttctagtcaagataaagataatagtgagccaagtactcaatctggtgctactcaagatgaaaacattgattctaacgcagctgttcaagagagaagcgacaactcagttactgaaccagcaaccacaactaatgctgaagaaaaagtagtggcaacaaatacccaagatactacgcaagataaagacaagcagacaaatgcgaatgaaactacgcaaaatactaccaatgtcgacaaaaaagatactgaagtaacgccgactaacgacgcaacaacagctacaccgaagacaaccgccaaggttaacgcaccggctgcaccaacagcaatgaaggcagcagctactgctgaaacaccagatccaacggttccagataactcagctaatactgctattatcaatgacaagaatagtttggaaaaaatttggcttgaaacatctactgcgcgggcccaggtctacactaccgttaagggaactgatcaaaaagtctatgtcagttcctatgcagaattcggtaagcgacttaattcattaatttttactaatcgctttgatccaaatagtctagaattacacattgaatatcaggtgttaaaggatagggttcaaaatttcattgtaaattggggagactggctccgactagataccagtagaattggtaaagatggtctaactttcactacagatacaggtgaaaaagtagcctatacgttaacaccaggatggggggaagtacaaaacctatgatgaatggcttagtgaaggccaagatatgagtaagataaatgctcttaaaattggcaacaatttaaaggccgggactaacttcgtattaaccgttcccctaaaatatattggtagaactgatggcacaaagcaatttaacaatgttcaagttgtagattacgggcagccaaatgctaatatggtgttcgattttattgaattacatccagagcaaatcgatactccagaagctccaactactgataaagagtcagttactaccggtatctataacaatccgttagctactgctacagactggtataaaacggagcatggtgaatatgttgcatactatacagctaaagggaaagatggtaagacctatgtaactggatatgtggctgccaatggtaagtctgagtcgattatcaatgttgatcagattgatctaaataccttggaataccatatgatttaccgtaatggtgacgaagaagtagcggccggtatttcagcaagctttgctgatggtaagactctagtggttgatgctagtcgtataggtgctgatggtatccgtttgaagagtcaacagggttggtcttataacaacgggggttatagagagaatactagtgggagactctattatagttgggaagattttcttaagaaccataacggatcggtagataacctcgttggcatcaatatgaatgcatccgctttcaagccgggcgatacaattgaagtagttgttcctgttaggtatattgggaaactttctgatcaagttcaatccttagaatttaaatctgaagctagaaaagatgtttcggttaaactctacttcacaactgtgcgcaaggacttaagccaggttaagcaggtagtcttgcttccgactgagttcatgggagaacaacctggtcaatcaaactggaagctggttaaggaaattgaaaaagatatgccaaatgggtgggaggccattaaaattagtaacttcccaacctataagggatcattcaatatggattcactaccaaaaggggacttaccatcggttgtttatggctctgcgcaatactttgttgacctccaagaaattcagaaaatttttgctaaccatggttacacggtcaagtatgctaacaacaacggtaaagctcaggaaatgccattctatggatacgttaccctgccactggcccttattgatggtggtggtaaacctgttgccccatctatctggacaatccaagttcaagctgtgcctgctattattttaaataaagatcaacactatgtggcagatccgaatgctaagccatgggacaccacttcaatgattgatgagatttatgctgctgatgacgcaggacagcggaagacgcgcgatcaactagaaaagttgccaaagacggacgtggatattagttatgaataccaagctccaggggctgctacagctgctccggttgataaggtcgacttgactaaggcgggggtatacactgtcacttacagtcatacttatgctgatgggcgagtagttaaggatagtcgcaaggtttatgttgatgatgttaagcaagaaaccaaggacattactcgaacaattattgtccacgagccaaacggaactgaccaaacagttatccaaaaagcaacattgacacggaaagtaattcttgatgcaactactggggaaatcaaatctgtgggtggatggtctactgctaagtgggaaagatactcagctccagaatttaaaggttacactccagccccggctcaaattgatgaaactgctgtgaacaaggacactcaggatacaactgttgagattagctatacagctaatgagatcacaaagccagaaaccaaggacattactcgaacaattattgtccacgagccaaacggaactgaccaaaaagttatccaaaaagcaacattgacacgggaagtgattctttatgcacctactgggaaaatcaaatctgtgggtgaatggtctactgctaagtgggaaagatactcagctccagaatttgaagattacactccagccccagctcaaattgatgaaactgctgtgaacaaggacactcaggatacaactgttgagattagctatacagctaatgagatcacaaagccagaaaccaaggacattactcgaacaattattgtccacacgccaagcggaactgaccaaaaagttatccaaaaagcaacattgacacgggaagtgattctttatgcacctactgggaaaatcaaatctgtgggtgaatggtctactgctaagtgggaaagatactcagctccagaatttaaaggttacactccagccccagctcaaattgatgaaactactgtgaacgagaacactcaggatacaactgttgagattagctatacagctaatgagaccccagagcaaccagataacagcaaggacaaaggtaataatgacaacaatggtggtaacaattcagatgcgattgtgccaataaatcctagtgacaataactcaaataattcaaataatgcaccaactgacaataagaagactgatgacaccaagaaagataatactggcaagaagattacaaaggagactcctaagaaggtaaagaataataagtctaacaagaccaaatcaacgactacttctaaatctaaccagtcttcaaaggctaagcgaaccactaaatctggtacgattagtcctaaggcagtcgctttagctaatactactgctggtctagctacttcagctaaggcaaatatggaaaacggtattgccaagaacaacagccaaaattctcaaactttgccacagactggtgaaaatgaaagtaaggtagcatttgccgttgccgggttgttagcagctgctttgggcatttttggtatagctattaatcataaaaaagaaaattaattagctaagttgaataaatcatacaaaaagacgcatagaatagcaatgtcattaagttaagacattgacgaaaatcagactttatgaaccgaattattttggctctttgtcaaacaccctaaagtataaaggtagatagaaacatgacgatgtttttatctaccttttttcttatacttagattgagcttgcggttgaacccttcaaggcagccgttagaataaggcagttttgctccattaagcacagcttttaggttatgtttaaaggtcaatagtgttttgtgcattaaagtcccaatttgatcttggcagttgattaataagttgagctcatgagtattgcccgtttcaacggcttgaataaagctttgcatcaggttatatgaattctctaaggtagtgctggtattgatgccttctgtaactacttgtgcttgagttaagcagtctttgtagtgccagttatagtgaggatgaactttttcaagttcatcaaacttcttcaagtataatttccaaggagacttaagcagctgatattgccgcgatcttttatcaaaggtcttcatgacttggaccctcagcgagttgaatgagcgcgtaagcatttgaatcatgtgaaaacgatcaatgacaatctgtgcattaggaaaacaagctctaacgatatcttgatagtaaaaattaagatccatcgtgaccgttttaacgttagctctagcttggagcgagaaacgaccaaaatacttaagcagcgtcttcttgtagcgagttctaagaatctgaacgacttgatgattatcacccatccaggcagataaagtgcagctggcggtaactcatcaaaagctaaatgagctggcaaatattcgtagctgtcaataaaccggtgtgaacagttgcccagtactctttgaacagtattaattgaaatattgttttctctggcaatgctggtcatagatcgatcttcagttaaagctgacaacactttaagcttagaggcattagaaatagaacagtatttaccaattcagactgagccatagatcagcgctcacaagtgcgacatttaactcgttgcttagctaatcttataatgaccggtaagcttgcattagctgtcggatagtgaatgttggtaatcaaatggccattatgtaagagatctagggagccgcagaaaggacaagcaggttgaagcaattcagcttcatagattttatgcttttgcagtttgatcgatttatagaaatcacctttatttataagaatttgtgtggaaacgatttttattgaagaggactatgtcctcttttttgcaataaaaaatcctgttaacagcttatcatatagataagtcatcaacaggaaaaattatagagccaatattttgagattaattgataggggttgaaaagtaaattttatttgttatagaaaatatagaaaaaggattgttcaagaaattattttacgaaacctgcagtgaaccaagtgttggcactaggcttaagtgaccagccagtgaccttcttgttaacagcagtgattgagtattggttggtagttggcacaacgtatgcttcatcatacatccacttttgccacttcttgaaggcattagcacggtaagtaggattgaaggccttctctgagtcgatatcagccaaaagcttagtttgcttaggtgaaacgaaacgagcaaagttgtatggtgcagcttcattgtaaaggtcgttaggggatggttcacttgaaagtgaccaaccaccttcgaagacgtcgattcttggatcgtcagattgaacagcttgtacccagttgttgaattccattggacggccgccgacaaatttaacatccaaaccaactttcttccattgttggatgtagtttctccaaacaggttcagcggtagttgagttgtttctaacagccaagttaattactaacttcttgccgttaggttgaactctgtattcacccttcttcttgtagccggctttatccaataattcgttagccttcttcaagttgtatgggtaacccttgattgacttgtcagtataatcaccaaattgttcagggatcaaagtgttaacgcggaaggccaagccgtggtagtaacgtttagcgactgcatcaacgttcattgcataagccattgccttacgcaatgatggattgtccatcttggagttcttgttttcaacgttcttgccagacttcttatcccatttacctaccttaaagcctaagtagttgtaggataggggaaccttaccaatgaagttggtatcagtagcgttcttaacatcatcccattgggtgttaactacgccagctacgtcgaacttgtgactcttgatggcttgagtaactgagttggtaccgatgactgtcatggataccttttccaagtttggtgtaccacgccagtaatgcgggttacgttcccaagtgacagattgaccacgaacaagcttgcttacgcggaatgggccgtagaagagtggttgttttctaaccttgtcactagacatcaacttggagaatggtacgtcctttaagtaatggtaaggttcagcgtattcctagaagtaaccgttacctgattgaagcataccaggcttcatttgtttaaagtgaattacgaccttgcggccatcttcgccatcaggcatctcaataccagaaatcttcttgctcttgccttcgtgatattctgctaaaccaacaatgtcggcaagagaatcggtataacgttgtgacttggagtctttattagcgataatttcataagcgtattccacgtctttagcattaacttgcttgccgtctgaccacttaacacccttcttaacctcgatagttacggtcttggctttacggtcaagcttaaaggtagcagcacctttattgttaatcttgtattgatcgttgactgagaataacccttcttgtcctggctctgcaacttcactgtcagtggcagtatcagataattctggcaagaaaataccagtgaagggactatcagattcgatagcataatttaaagtgccaccttttttaacacttttcacaggaacagtttgactgaatttgtgatgtgtttcatctgcattattattttttgaatttttattattaccacaggcaaccaaacttaaagctgccccagaaacaagtgctaatgcaccaaaatatcgttttgctttactcattcaaaaagcacctccaaataaattaaaaatatttgagttttattctatgatattaaaatgaaaaaaacaatagaaagatgaataaaaatgtgaaaaatattatttttaaattatttttgaagctaagattagttttctttcttggctaattaggcatagaataaggaaataacagctttttatgttggaggaaaatatggatacagcctggcaaaaatttaaaaataatattccattacgtcgatttgtggtactgctattaattattgcctgcctttatgaaatacgagcaatgatgaacacagtattattaacttttatttttacttatgtgatcgtgcatttaattcatctagtgcagcggtattttcctaaaataccaacaggcctaattgttgcggtaacatatctaattatcttggcgctactttatttcgtggttaccatttatttgcccatgttagttggccaaatatctaaaatggtaaagtcagtgatggcgttttatgaatcaaatgaatcatcgcgcttagccagccatgtaacgcgttatatcagtaaaggtgagattgttacgcaggcaaaacgagttgggacttttgctctgcatacggtgaccaattttggtagtttaacaattgctacctttatgtcattgattttgagtttcttctatacgattgaattagatagaatgattgaattttcaaagttatttgttaaaagtggttactttaaatggctttttgaggatattcgctattttggtaaaaagtttaccaatacttttggtgtcgttttagaggcgcaattctttattgccatttgtaatacggccttgacgatgattggtctggcatttatgcatatgccgcaaattattgccttaggcttaatggtctttattttaagtttagtgccagtagctggtgtgatcatttctttaattccattaagtattatcggctattctgttggtggcattcgttatgtgatttatatcttcattatgatcatgattattcatgcaattgaggcctatgtgttgaatcccaaatttatggctagcaagactgaattaccaattttctatacttttttagttttgttagtagctgaacacttctggggtacttggggcttgattgttggtgtaccgatcttcactttcttgcttgatgtcttagggattaaatcggcgaagaaaagtaaaaagaaagcgaataaataatgagagtacttttgacaggtgatagcattattgcacgccaggaaggaaaaaatgaaccgcatcttaattggaatttgcaccaattattgccagatattgaaatagaaaataccgctgtttcggggattaactccggggccttttttgccaaattaaatgaattagtactaagcgtaaagcagtgcgataatttggtgatcttgctgggaaccaatgatttggctatgcacaaacaagtgccagcaaggcaatttaagcaaaatatggaaattatttcctcggcaataatttgtcaatattacccaccacatgttctgcttgtttcgccgccagctgttgatgaagctaagcaacgtgtacggaataatacgttagtagcggaatatgctcagatcgtgaaagaagtagcacatgagtatcattttcgttatgcagatctggcacaagctatgcgggatactggcgatttaagcgagatttgtcaaggagtaaaaaacgatggacttcattttggtgatcgtggctatgagattttaggaaaactaattgctgaaaatttgaaacaaatgtaaaaaggaccgcaatttgcggtcctttatttttcgctattttaatgttgcccaaagcaagcttccagctagcgcaatggccaagaacggaatgagcaaataggcaaaaaagaaaaacataattcctacgactagtaaaaagccgataattttaatgaggccaattcctaatttaaagaatagccagagtaagagtaatgttaataataaagaaagcatattaatacctccataaatctatgagagtattttactaccaaattggacgaatagaatagtaggaagattaatgctttagaaaaatttagttaccggtaacaagataaattatattgaaagctctttctgtaaccgctatattttaactattgaaagcgatttaagaaacgagaggaaaaataaatggaggagaaaaaaactgggttacctacgctagctagtacgacaatttggatgattagtttggggtatttgggtgtgcaaatcgcctttactttggaaacatcacagatgagtcgaatcttccaaacattgggtgctgatccgacaaaattaggctggttctttattttaccgccgttagctggattggtagtgcaacctggaattggatcattatccgatcgaacttggattcctaagattggacggcgtttgccatatttattagtcggtatgatctttgccgtaattactatgattttgttaccaaatgttggtagttttggtctaggctatggttcaattgaggctctaatatttggtgctgttgcaatcgcgatattagacgtggcatcgaacatggcaatgcaaccatttaaaatgatgattggtgacatggtcaatgatgaacaaaagtcatatgcctatgggattcaaagcatgttgtccaactttggtgctgttattgccgcatttttcccgttcttattaactagtttgggtgttgctaatactgctaaaaagggtgtggtaccacaatcagtaattatttcattttatgttggtgctgccgttttagtcattacatcattgttcacgatattcagagtacatgaatatgatccagaaacctacgctcgttatcatggaattaaagaatctgataatcaagaaggcggtggttggattgaactgcttaagaaggcgccaaaagtcttctggcaagtgtcattagttcagttcttctgctggatttctttccaatatttatcaacttacgctactggtgctattgcacaaaatgtttggaatacgaccaatgcctcctctgcaggctaccagattgctggtaactggtttggtgttttaactgctgtacaatcaattgcggcagtagtttggtcatatgttttagcgaaggttccaaataatcaccacaagctaggttacggtatcagtttgctactaggtggagtaggatatacttcaatcttcttgattcattctcaggggtttttaattctatccttcattttaattggtatcagttgggctggtatgaatacttatccattgacgatggtatctaatgctttatcaggtaaacacatgggaacatacttaggattgttcaattgctcaatctgcttacctcaaattgtagcatcactgctcagcttcatgattttcccaatggtgggtaactccatgccagcaatgatgttgattactggtatttcaggcttcttaggcgctttatcagttttagcaattaaggaaacctacgtaaaatagcataatttttccgataaaaaaaacactgcgtgcattgtcaatgtcattaagttaagctattgacattggagaaaaaacaattaaagcatcatttggctttagatagccaatttgatgcttttttgtgtacgccaaataagcgtagtttgtatttcttttttattaggccacgcgatacatgtaatatactgcagacttggcttttaaatttcgtttgtcttttcgcctttatttttgcaaaaaaagaatcgaatccaaatgattcaattcctaaaaagatcagttttcaaaagtcaatagcttaacttaatgacattgcattttgaataactgcggagatttttggtataagtcccttaacgatgacctcggctcttattataataagaaaatccgcaaattcacagtgttcatattatagctgtcgttcactcttaacttataatcctaaaataacgttctaatctgtgaagtattgcagaatatcctcctcagttaggcgttttttgtcgtcgcctttgacatcaaaaacgattctaccattgtttaaaatgatagtgcggtttccgtatttgattgcgtcttttaattggtgagtgatcatgacacaggttaaatgctcttcttgcacaactttatcagttagttcaagcaattcgcggctagtatttggatctaacgccgcagtatgctcatctagtaagagtaaatcagggcgcttaattgtcgccattaaaaaacttaatgtttgtcgctgaccaccagaaagattacccacaaaagtatttaagcgttcatttaacccattagggagttgggccgcctggcgtttaaattcttgcatatgtttatctaggcctcttaaacgcagaccgcggtgttcacctcgtttggttgcaagtaataggttttctgcaacagtcattcgcggagctgtacccattttaggatcttggaatacttgggcaatatatttagcgcgttttacttcagaaagattggttaaatcttggtctttgagcagaatttttccgctagtaggaaaaatagagccattgataatatttagtagcgttgatttaccagcaccgttggttcctaaaagagtaacaaaatctccatcttcaagttttaaattgatgtttttgaggatttgcttttcctcattggtaccagcattaacagtagtagtaatattttgtaaatcaagaatagtactcatggtttttcaacgcctttctttaataacttacgagtgcggaatttttgttcaaataatggaagcatcatgcaaatagcaagaataatagcggaaatcaatttaaagtcgttggtactaaagccaagttggaggactaggagtaagataaggcgataaataatactgccgataacaactgctaccaagcgggcggttaaacttaaattaccataaacgacttcaccaataatgatggcagctagtccgataaccatagtaccaatacccatattaacgtcagcgtaaccaccgttttgggctaataatccaccagctaagccgatcaagccattagaaagcattagacctaagattttcatattatcggtattgatcccaagagattgggccattttttcgttgtcaccagtggcaataaaggcttgaccaagatcagtatcaaggaaaactgctagcaaaacgatgacgataatggcaatgatcaaaccaacaacaatagtaggaaaattgatcggtaatttttgtaaaagctgaccgtttagtaaagtatttttgttaagtaaaccaacattagccttgcctagaattctaagattaactgagtagacgccagtcatcgttaaaataccagctaaaagaacaggaatttttcctttagtatatagtaagccggttactaagccagtgaccatgccagcgaagaaggaaagaatggtagctgctaaaggattgacgccatgaactaaagcactaacacaaattgcggcaccgaaggggaaggttccttcaacagtcatgtctgggaaatttaaaattctaaaagttaggtagaggcctaaggctaaaataccccagagtaagccttggccaatagaagaagtaattaagctcatttgataattcgtcctttcttttgggcagcttgaattacactgttaggaatagtgatgtttaattcatgtgctgctttttcattgattactgtttcataatgggttacgcgtctgactggaagagcagcagggtttttaccatgtaaaatttgtcctgccatttgtccagttaagattcccatgtcgaattgactgacacacctggtagcgagaccaccacttttaaccatagtatcggcagcaggaaaaactgggatcttggcactgttagtagcctttaataaggtggcaattccactagctacagtattgtcggttgggacataaactgcttgaaccttgcctaccatggtttgggcaacttgttcgatatcattggttgaagtgatagtgtaagggataactttaagtcctgttgcttcagctagtcgtctgaattcacggtactctgatgctgatgaatcatcacttgaggtgtaaatgacaccgatgtttttggctttaggtagaatttcttgcattaaggccagctggctggcgattggctggcggtcctggacaccggtaattttaccgccgggatgcgctaggctttttactaaatgggccccaagaggatcgctgaccgcgcccataactacagggatgttgccagaagtattagctagagattggacagcaggagtggcaattccaatagttacagtcgcattttcctggctaaaacgatcgctcattgatttcagattactttgatcaccttgggcattttgaaaatcaattttaagattttttcctttgacatagccttcatctttgagaccctgaataattcctcgatgaatctgatctagagcggggtggctcattgtttgcaagataccgacagttggcgttttcttttccgcatttttcttatttacttcactgacaaatgcaactgccagaaaagcaaaaagagcaataattgttccgattaaccttttcattctttttctccttcaaacaaaaaaggcacttccttttttcgggaaatgcctaaaacaaaacccgcacgttattttccgtgcgagcaatatttcttgaagattttaccagcacagatacgatcttaatgagtcgcatctgtacttcacgaacagaaacaactctagtgctggaattgccaacgattgattgctgtaaatttaatcatgataaaatcttcctttcgttcaaatttgttagctaaattttaagtaattatgagaaagatgtcaaatgattttttgttagatttatttagttttgaataatttttaaaatgctataataattattccggcaaccatcataaaaagaagggaggaattctcttgcgctatcaacaaataatttttgatgtagatgacacaattatcgattttgcggcaactgaagattttgctttacatagcttgtttaacgctcatcactggcctttatctgcggaattgcagcggcagtatcattcttataatcaaggactttggcgccaacttgaacaaggtgaactaacttatgaagagttaagtgaaatgacttttcatgattttattttggatcattttggcattgagattgatggcaagaaggcaatggatgaatatcgttcatactttggtgaagcacaccaattattgcctggggttgaagatacgttgaaatttgctaaaaagcagggctataagctgaccgttttgagcaatggtgaaaaatttatgcaaaatcaccggttggagcttgctggggtgaaaaaatattttgacttaattgttacgtcagaggaagcccattattctaagcctaatcttcatgcctttgactatttcttcagtcgaactgagatcggtcctagtgagacagtcttttttggggacggcctacaatctgatattttaggtgcagaaaaatatggctttgatagtatttggtacaatcatcgccatcgtaaaaataccttgcatttgcatcctaagtttgtagtagaaacttatccagaattggttaaattaatgcagaatgattttgagaagaagtactaatcattatactttttgctcttcaagaagatgccccaaccaatagttaataagctgacaaaaattattaaaatccaaaagccgttttcattttctttacctggtaagccgccgacattcatgccccaaatgccactgattaaagcgggaagagcaattaccagggcagctgaatctagatatttcattaaatgatttaggtgactgtccatcatggcggtaaagaggccgctaatggaattgagcaagtcagtgtaaacgtgaatcattttggtaattcgtttttgcttggtcatgatacttttgacgcgggcttgatttgctagcttgttttctactaaataattaccaaattcttctagactaggtgtttgatcatctaaggtatgctttaagtaaactagctggcgagttaaatctgttactttttttaattctttggtcttagttgttcttcttgcagcttgatctaaatggtcaattttttgtttaattgttactaattctgcatgaagatgcttgatttggatacacaggctttgaaaaattgtttcaataatattttcttgcggttttaattctgaaagacttcttgttgtgccaataaagagatcattttggtcaaaaattgtaaaaattggaattagctcttgttcaattggcaagtcattacttaatagatcgaaactcactaataagtgaccattttttagtttattagaatcaatagggataaaacgagcaacctcaatcgaggaattagggtaagtgaaaattgtaggatctagatcccattttttgattaaatgatcgatatcgttttgcgtcaattgatcttttaaaattatattctgactattagtaagcatatttgttcacctctgtttcttttttagtttaagattaacatgtaatgttttttagactgaattaagttgacttgaaaatatgtttttttaaaaaatatagaaaggtgagaatatggaattacattcacttactgatacttatactttgaacaacggcgtaaaaattcctgtaattggtttcggtacttggcaaacaccaagtggagaagttgcaagagaatctgttgaagccgcacttgaggcgggataccgtcacatagatactgctgcagcttacggcaatgaagaaagtgttggcgaagcaattaaacgtagtggcgttaaccgccatgaattatttgtaactactaaattgtggaattccgatcatggttatgacaagactaaaaaggcaattgatactagtctagaaaaattagatttagactatcttgatctttacttaatccattggcctaatcctgtagctatgcgtgacaactgggcagagcttaacgctgaaagttggcaggcgatggaagaagcagtgaaggctggcaagattcgcgcaattggtgtatccaactttagaaagcatcacctggatgaattaatgaagactgctgaaattaagccggtagttaaccaaagttacttgaatccgagtgatttgcaaccggaagtaacggccgcaagcaaggaatatgatttgcttaatgaggcttacagtcctttgggtacaggtggtttattaggcaatgaggtagttaatgcagttgctgaaaactatggtaaatcaccagctcaaatcttgattcgctggtccttacaacatggctttttgccattgccgaagtcagttcatcctaagtatattgcggctaatggtgatgtctttgactttgagattagtccagaagacatgaagaagttagatggtttacgtggggcaagtaagttggctaatgatccggatgaggttaacttttaatttaatttggaataaagaaaattgaattatcacaagaagtatcttatttttgaagtaagatacttttttattaggtgagacaatgaagaaaattacaacaggaattgtagctcacgttgacgcgggcaaaacgactctttctgaggctctgctgtacaaggcaggaaatttgcggacgctaggaagagtagacaatggggatgcttttttagatacagatcaattggagaaaaaacgtggcattaccattttttctcatgaagctaaattaacgactgatgatttagaaattacgttgttggacacaccgggacacgttgatttcagtgcacaaacagaagaaacgctgagtgtacttgattatgctatcttggttatttcaattacagatggtgtaactagttatactcgcactttgtggcatttgctcaagcgatatcaggtaccagtttttatttttgtgaataaggttgatgcgataggcgctgatcgagggatggcgttggttgatattcaaaagaacttaagtgagagttgcgttgatttttcgaagattgatgatgaattttatgaaaatgtggctgccacaggtgatgccttgcttgagaagtatttggatagtggtgccatttatgatcaggacgtgcagaatgcaattgtgcagcggaaagtttttccaatttattttggttctgcgttgaaattaacaggaattacggaatttttggctggttttagtaaatggactaaggaaaaggaattctctgataagtttgcggcacgatgttttaagatctcacatgatgctaagggtgaacgcttaacttggttgcgaattttgggtggcagcttaaaggccaagactgagctagctggtgagaaaattaatcagttgcgtagttataatggtgaaaaatttgcgactattacagaagcagctgctggagaaattgttgctgcaacaggattgactaagacgtatccaggacaaggattcggcgtgggggatgcaccaactgcactgcttaagccagttttgacctataaagttaatccccaggataatgatcttcacgcttgcttaaaagctctgcaaaccttggaagatgaagatccacagctgcatgtgacttggtccgaacatttgcaagaaatccacgtgcaagtgatgggaaagattcaattagaaattttagaacagttaatgcaagaacgttttggtttgaatattgtttttgaacagggaagtattctttatcaagaaacaatcactaaaccaattgaagcagtaggccactttgaaccgctacgtcactacgcggaagttcatcttttactggagccactgccacgtaatagcggtattgtttttgaaaataaatgcagtttagaagttttgactaaaaattggcaacatcaaatcatgacggcattgaagtctaaagaacatcttggtgttttgacagcttcgccgattacagatatgaagattaccttgatcggtggtaaaggctcaattgtacattcggttggtggcgatttccgtgaagcaacttatcgtgcagtgcggcaaggtttaatggaagaaaagatacgccaacaaactattttgctcgaaccgtggtatgattttcgcttagaaataggaaaagatcaggtagggcgtgctttaaatgatattcagcgcatgaatggaaaatttagtacgcctgaaaatattggtgaacgaacagtcatatccggttctgcaccggtagctgaaatgcaagattatgcgacagaagtgcgcaattatacgcatggtgaaggtaatcttgaatgcgtagtcagtggctatttgccttgtcacaatgcggcagaaattattgaggaaaagaattatgatcccgtttctgatctggagaatacgcctaactctgtcttttgttcacatggtgcaggtcacaccgtcacttgggataaggtgccagagactgcacaatatccttatacttatccattagattagcatgataccatgaattgtttatcttgttacatgtgaaacattaaaaatgcggcatagtgcttttcttattaaaaagtgcaacttgaaataagcgaaatatttgactagttatgaaagaaatttcattttattagcaaaatactgctagaaaatcgcttgcatagtaagataaaggtacgatagaaaggtgataaaacatgacacaaataccttttaaagctgtagcggttgatctagatggcacttttttgaccgaaaaaaagacttttgatcatgcgctatttgcaaaagttttacgaaaattgcaagctaatcaaataccgtttatctgtgcaacagggaaccaactaattcgttcgcatgaatattttgacgagtttactaatgaagtagattatgtgtctgaaaatggggcaattctagaagccgatggcaaagtatttaagcggattgcgattgactatgatactgcacaaaaattgttacattttattcaaacagaataccctgaagcaatcattatggttagcgcacagcatcattgctatattttgacgagtatggatcaagcggataaagacgacattagaatttattatcgtgatgttcaggaaatcgatcagtttactgacattgatccagccgatgcgatcttgaaggtttgtctgacagctgatgatgaactggcgcaggtgattcaggatcggtttaatgaaaaatatggtgactgtattcgcggcactagcagtggtaatatgacaatcgacttggtgcataaaggcattaataaggccaagggcgtagacgatatgcttaagcattatggcattgcgcaaaaagatttgattgcctttggcgatggcgaaaatgatattgatatgcttaaggcatgtggctatagctatgcgatgaaaaacgccaatgcgaaggctaaggcggtagcaaagtatgaggcgccaacgaatgatgaaaatggtgttttgaaagttttggctaagtatttagatattgattaatttaatacgcaaaaaagacttgagaagtaattttcccaagtcttttagtttgctttattaactgctctgaaaatattaagtccgctaattagaatgatgaatccacaagctaaaatcagaaccgtttcaccagagctgtctaacaaaattccggcaacaattgaactaatcggtccaccaatagaggtactggtacgaatagtagttagcactctgcctaatatttcatcgtccgcagtaatctgaatcaatgattctgccaaaatattgtgaatactcgtcattagcccaaataagaaaattagtcctgtgaatatcaaccaattgttactgaagaaaattatcaaaagtaatggtactgcactagctatccaagtaaaaccaattgtttttacccgtacggataatcttcctgcaatagttgcacctattacaaagccaatcataaaactgatatagaacatactgtatagtcccgcttgaccattttgttgagcaattcttggcaacagaatggccattgctggcgtcacaaaagaatacaggattgaggaccagaagtaatgacttaagaaataatttgttttaataaacttatagccattaagaatttgattgaggtattttgcctctgcttttttgactttaggtctatctttaatttcttttagggcgtaaaacagaaaaacaaaactgattaggctcagtagactgcagatcaacattacattagctgaaattaaaaaagttaataaaaatccagaaagagcagttcccgctacattcacaagctggtcgatgttgctaactttagaaattagattatttaattcttggtcatcagccgttgtttcttttaaaatagcccggtcagctggattaaaaaattcatcgcagacagatactattcctgcgcagattaatgccaaaatataacttttgctaagttggtaaactgcaattgttgtggcaaataggaaaacagtttgaacaagaattgaatagtaacttgtccttttgaatgaataatgatcgataatggggccgtagaatattgataaggcggcagtggtggaaaagatggcttccgcaattccgacgacaaaggaacttttggtggaagtttgcagccaccagataaagaccatgctgaagagggaattagctagtccgccaacggcacgcgagaaaaaatatgatttcttttttaacattttatttatcctattctcatttttattttccaattataccaatatttttccaattaggatcaatttaataaaaatagtacaaaaaaagacttgagaagtaatttttcccaagtcttttagtttgtcttaatttaggttaattaaaacttgttcttgtccaaagcaactggagaatctggcttttcaccattgatcatcttcaagttgttgtcgaatgccttaacaaccatgttacgtacggcgtgggtggtgtagaaggcggtgtgtggagttaccaaaacgtttggacgatcaattaagtcagctaaacgcttgtctgggaattctttgccttcccaatcttcgttaaatacaccaacttcgtcttcgtaagtatccataacaaagccaaagatcttacctgagtccaaaccgcggataacagcgtcagtgtcaacaagtggaccacgtgagcagtttacaattacaacgccatctttcatcttggcaattgattcgtcattgatcatgtgtacatttgctggaacatctggtacgtgaagtgaaattacatcagcttgcttgtacaagtcgtcaagtgagtcaacgtagtaacccttcttttcgagttctgggttcttgaagatatcgtaagcaatgacctttgcgccgaaaccttccataattctcataaatacttgaccaatgtgaccagtacctacaacaccaacaacttggtcacgaacttcacgaccaatagtaggtgcccaacgtaagtcgcgcttagccatcttttcgtccatacgcttgtcttgacgtaatacacgagcagcttggattgcagcatgttcagcaatagcgtcaggagagtatacaggaacgttagtaatttcaaagccaagttccttagccttgtccatgtcgatgttgtcgacaccaacgttacgtaatgacatcttagttacgccagcgtctgccaatgcttgaagagtttctggggtgtagtctaattgttggtaaacaacaacaccgtcagcacccttagctaacttagcagtttcaggagtcaaaagcttatcagtgtaatctacatcgatatccttgtgagcatccttccattcgtttaagaatggttcttcgtctttacgaatagcgtaagcaaaaatctttgtcataaatttaacctccgtaaaatttattagtatgaccagtcctcattatacgcttttacttgctcaacaaaacacaaaagaaccatttttttgtatagattttaagaaaaataaaagtcaagttttactctgagcaaaaaagttgcaattttttcaaaaaaagtttatagcctaaaaattgcaactattattaactgttacctaatctcaatcccatagatatgaaaattatttttgtatatagcaatattagttaaaggtagtatatggatttgtataagagacgcattttcgttatataacccaggttatataatggactttaagtagagaaacaaacatagcggaggaaaattgaatatgcattttaaaggagaaagccaacagcatttcagcctaagaaagctgacaattggtgttgcttctgtaataatcgggaccacctttatgttttttggtggtcatgctgttcatgcagatgatttaagtagagatgctgagcaaaccagctcagttgttcaaaaacagagtagtgagaaaatagatgtagatgcagtcaaagaagctgataatgtttcaaatcaaagacaagacttacccagacggtactaagagtaccgcaactgttcctgtaactgtcattgcaccaaatgtaccagacgttatctacgtaccaaagggtgacaagtttccagacccaagtactgtagttactaactctaacgatatcaaggacaagattcctgacacgacttacacttggaaaactactccagatactccaaatactaaagtagtaattaactataaggctaataatcctggtactccagataccccagttactccaccagtggatccaggcgataatccagcaaccccagttaccccgcctgtaaagccagagcagaagccaacaacaccaactcctcatgctactaagacaccagcaaaggataatggtggcaagaagacagtagctagtgagcaaaaatctactttgccacaaacggggaagaaggataacgttgctttgactgctatcggtgtagctattgcagctgctggaagcttattaggattagcagatagcaagaagcatagatcttaatttgtaatatctaatttctgtttactaagaagcaagttgactcagataggagctagcttgcttttttgtctaaaagtttaaggatttctaaagacaaaaagcaaatagtgacgcattgtcataaagctgatattatatactcataacaaaaatacaacgcatcaaatagagatgaattgtaagaaggtaacaaatcttctaattccttattaatacatcctattgggcctttattaattcatacattgggtattgctttttgctggttgtcccctatgcaaccgcgaaagttaagattgataataagtccatcccctttttgcgaaggtaaagagtcaagaccccctgcaacatctcttgcgttgaatcttttgttaatcttgataatttatcttcgcaacattagtgatgagtaggctaatgtaaaaaaatctcgttattctcattcaacacaactcccttaaaagggctggtttagaaaagtcatctaaatcagtcctttttctttttttcgttataattaaacttgagaactaaaacaaaggggaagaaaaatgatcttaatttcatggaatatcgattcattaaatgcagctctgactggtacttcagctagggcggaagaaacgcggcaagttttaactaaaattcatgatgccaatccagatattattgcgattcaagaaactaagctgcgtgcaactgggccaactaaaaaacataaagaagtgttggctgaaaagttccctgagtatgactatgtttggcgctcttcagaagaaccagctagaaaaggctatgctggtacaatgtatctttataagaaaggattaactcctgcagtgtctgagccgattattggcgcccctgagccgatggatcatgagggacggataatcacactggaatttgataaatactttgtcacccaggtttatacgccaaattcaggcagtggtttaaagcgactagctgaacgtcaagtttgggaccaaaagtatattgaatatctgcaaaaattagatgaaaaaaagccagttttagctagtggtgattacaactgtgctcataccgagattgacttgaagcatcccgaaaataatcatcactcagcaggttttactgatgaagaaagagtcgactttaccaatttgctcaatgctggctttaccgatacctttagaaaagttcatggtgagattactggcgtatattcttggtgggctcaacgtgtcagaaccgctaaggctaacaactctggctggagaattgattactggctagtaagcaatcgcattgctgataaggtggtccgctcagagatgatcgatacaggcaaacgagcagaccactgcccaattttgcttgaaataaatctttaaattgaagcaagccctagtataatttctttttgaaatgtttttattttgaaaaagaagtaggggttgaaattctttgaataacgagaaaaaagaagattgggctttggagcaggatctgaagtacaatcgtctgacagcatttaagctattcgcgatgactagttcaatggttatttccgttgatgaactcgcaccatttggtaaaactggagcaacggcactgttttacttgttaattgctggaatcgcttggtttatcccgattacgcaaatggctggagaaatggcctcaattgatggctgggaaaaaggcggaatcttcacttgggtgaaaggatctcttggagacaaaacaggctggacagcaatgttttatcaatggattcatattactgttggtatggatacgatgatgtatgtgatcattggggcattgtctatcacatttgggacaccttggttcaacaccacgccaatcgtacgcttcattttaatgatggttattctgtggggagcaacagcgattcaggtaattggtgttagaaagattggtcgaatcgctgaatggctgtttattctggggattgcgacaccagtaattttattgatcatttcattcttcgtatatgtgattcaggggcatcccttgcatatgacgattaactggaatactgtaattccacataaattgaatggtaatacattagttgcctttgtcccatttatgttggccttttgtggtggggaagcttctgcaccgcacgttaaaaacttggaccacatcaagtcatactcaaaagttatgcttggcttagccgttactgcaatctgcttcgacttgctaggtagtatggcaattggaatgactgtgcctaaggatcaaatagagaacagtacaggctttgtttatacctatggcaagctgttaacgtcaatcgggctacctggtgatctgttgcaaaaaattgtgggtataatgttagcctgcggtattattggtgagctaggcaactggattgctggtcctaatcagggaatgtatgaagcggctaaagagggctatatgcctaagttttttgctaaaaccactaagcacggcgtgccattaagaattatggttttacaatcaagtatcgttaccatttctgcattattgattacttttaccagtggtgccgatgcagattttgcgtttaacgtttcattggccgcaacgacggcgcaatatctcatggtttatatgattatgttgattgcttacatggttttgaaaagaaagcatgaagattatcaccgtatgtattacatgagcaagaaccctaatttgagtattgcaattgcggtgcttgcattaatcatcacggttatagctttctttgtaacttttgttccagcacaaggcacgccaagcaatttgcgtcacgtttatgtttggaccttaatcggcatgtgtgccattgtgtcgattttgccacttattttgtatcgctggcatgaaaaatggcaatcacaatagaattaagaagcattcgtttttcaagacggatgcttttttagtagaatttgagagaggtgaataaaatggcagatgcgatgagggatgcaatattaaatggttttgttgatcaaaattatttaggaagtgaagaattaggtcctaaaatattagctaataatcagcaagagagaatctggcagaatttgcgccaggaattgtatagttgcaagtcctttacttgggcggttgcgtttattacgcaagacatgctagttccgtttaaggtgataatggcagatttagcgaaaaatggaattagtggcacgattattactggtgattacttgggttttaacaatccgcgtgtttttacggaattacaaaagattcctaatttagaagttcgtattgctaataaggcaggtttccatactaaaggatatttatttgatcatgaaaactatcaaactgtgattattggcagtgctaattttacacgttcagctctgctggctaactatgagtgggctttgaaagtaagttcaaaaaagcaagcagatttaacagctcaattagtggataaaattgcagatttgaaacaggatagttttgttttaaattcagcctggctaacagattatcgtaaaaattgggtaaagcctgagcgagttgctactgatcggcatcagacaaaaattttaccaaataaaatgcaaaaagcggctttaaaacagatagaagcactagttacaagtggtgaaaaacgagggctagtagtgtcagccacaggaacggggaaaacttatttaggtgcttttgctgttaagaaatatcagccgcggcgttttttatacattgtgcatcgtgagcaaattgctaaaaagtcattagaaagtttttatcgtgtaatcggtggaccaagatcggattatggcttattaacgggaaataggcacaatttacaggccaagtatttatttgcgacggtacaaacgataagtcaacctgagatgctggctaattttaatagcgatgaatttgattatatcttgattgatgaagcacacagggcagctgcaccttcgtatcagcgccttttacattattttaagcccaatttttggttaggaatgacggctacgcctgaacgaatggatgagcaaaatgtttaccagatttttgactacaatttggcatatgaaattcgtttgcgggatgcactggaagagaagatgctggcgccatttcattatgtgggtgtccaggattatgaagcagacggagtagtgattgatgaaacaacagatttacgctacctagcttctacatctcgagtagactatgttttaaaggaattagactattacggctattgtggaacaaaggctaaaggcttggttttctgcagtcgacaggatgaagcacgtgaattagcttggctttttagtcaaaaaggacatcccgctgtagcattgaccaatgaggataatgaaaaaagacgtaatgaagtggttgcgtctttagttaaaggtgagattgggtatattgtagcggttgacttgtttaacgaaggaatcgacatccctgccttgaatcaaattgtgatgttacgcaacacacagtcgagcatagtgtttatccagcagttaggccgggggcttcgtaaatatcctggcaaagattttaccgttgtgctagattttatcggcaattataaaaacaattacatgattccgttggcactgaatcaggatacttctcgaagcaaagatcaagctaaacgagaaacgcgtctgccaagctttattgatgtttcaacgattaactttagtaaaattgccagtgaaaaaattttggcttcgcttgatagtgtcaagcttgatgggatgcgtgaattgcggcagagttaccatgatctcaagaacaaactagggcgtgtaccgctactatttgatttttatcaatatggctcagttgcaccgattgtttttgcacaaaatcatggcttggcaagctatgctgactttttgggtaaaatgggcgaagacgttaatttatcaaaatatgaaaatgaagtgctgtcttttgtgactaaggaattacttaatggtaaaagaattcacgagttacttttgttagagatgctacttgaacaagatattgttaagcaagaagattatctagctcaattgaaacgacaccatgcttatgtaaatgatgaattgttagcttctgttgatgcgattttatcgctagatttttttgatattaagcagggaaagactaccaaaaaagcacaatatggtaaattgccgttagttgaacgtagcaatttatttgactatcaattgaatggttctctacgctctgccctagatcaacatgattttaagaatttatttgttgatgctattaaaactggtttggccttaaatcaggaatatgataatcagcgtcaatttactttatatcagcaatatgatcgtaaggacgcttgtcgactcttgaactggcctaaggatgtttcggccccgatgtatggctatcgtgttggtgagcaggacacaccaatcttcatcacttatcataaagatgatcatgaaaagcggaatgctctgtatcgtaatacattggctgatgggcgcagtttgcgctggtatactcgggtaccacggcatttagattctgatgaggtacagcgtttgcttaatacgcgagggatgaatttgcatatatttgttaaaagaagcgatgcagatggtaagcagttcttttatttaggcaaggcaaagattcaagctgattctgttcgcgaagaattgctcggtgttaagaaaaagccagctgtagggatgaacttaatgttgaaacatccactgagtgagtcaatgcatgagttattatttgaatagaccaaaaaagcctttccgcttaggaaaagcttttttaattgccgctaatattaattagatcttggtcatcttggttattatccttatcaaacattctaggcttgatgtgatctagaatcttagtcccgatatttttctgagcagtttcatcaccgctaacctggtttaaaaacataattattccatatcgattatctgtagtcattttgatccaattaccaaaatgagtgttgcttaagctaccataagcagatttagtatggtcatcatctaaatgaagccctccagaataattagtggttgcacttttaagatgagttaagtaatagaaatcggatttgcttaagatactaccattggttaagccaagctggatcttgtaataatccattggggtagtgaacatattgcctgcgcctggaagctgggaggcaagagtctttttaacgtattcagcgtcttggtaatttttaccattattccagacgtaagagataggatcggttttccaactaggaatatcctgataaaggaatgtattagcaagccctaatttgttaatgatgcgattattgaaattgttttcgtaggattgtccgctgattttaataataattccggctaataaaagatagttggtattattgtagaagtaggttcctggtgtcccttgagtgccgttattagtattatcaatagcccaattgatggcgtcattctcacttaaaacttttccgcgatccaattcagtattggttgcttgaatgccagaagtatgggtcattaactgtccaatagtaatattatcggcgtttttaagattagggtaccaacgtgaaattttggtgttttgcgtaaatttttgactagtgtgccagttttcattcatcagctgaattatcattgctgctgtaacaactttttgcaaagaagcagttggataaactacgttgtcgttcccattaccaacttttttaccgtaccaagcgtagccatagctgatttgttgcggctgaccgtttttgataatgacgatactaccgcgagtattgttttgagccaaagtattgcggacaaaatttcgcatttcggttttagagtatgaactggcttgaacttgtggtggttcagtgatcgcaaatgcaggaactgtcgttagcagcgcagcggtagctagtccaataattgattttttcaaaaattaaaaggcctcccttaaaaagtggtttgtttacattttagcgcgttctttgcatcggacaaactattatcttggtgaaaagacgtatttttagctagcttgttgaaaaagtgcggctaattttgctctgagtgcgggatcatgagcgtataaataggtaccgcggattcctcgcttgaatagaacgttgagtgaattcatgaccatcttctcttcatattctattttttcttttgagttggttagatcattacgctttttgaacatctcaacatctgtaattttgtctaaattaactttaagttgattggtgcggggaatcaggctgattggtggaccgataatgatgccagcataatttaggtcaaaaccttggcaagtatagatagaaccaacttcattgattgttgtaggaatttctgcccaaggagttgatgtgtagttgtattgatcccatggcagcatgaatttcccttctttaatgtaatgtttgccaccatcaagagtagatggatagccggaagttgaaagaattcttgccaggccgtctgtttgatttctcttgacgatttcttgccgcattttttctgcatcagtaaaaatacgaaagtcgtagttgtgccacatttctttttttaagggcattaatttattatgtgtaaaaaagttaaaccattctattagactatctggtgccatcattctaaattgatgatgtagttgatagtcttcgtggggataatgatgagtaattgcttcaagtcgcttacgtgtccagaagcttttcattcgtaaaacttggttttcatcaaataccaaaatgataacttttgaccgcttaataacctcctctaattggttatcgtgataaaagttgttgtagtgatcaggctgagataagagcaagtgtgcttcatcaatgacgacaacatcagcactggtttgttttttgtccatctgattaataaatgaagttggccgcatataatttttcttatatagttctttaattggcccagcaatctgcttatagacttttagcagttcagggtgatttactaaaaagtagttttgagttttatacagttggctgcctgtttggtggtttaatttttgcaactgatcaaaaagggcagaaagcactacacttttaccagtacctgcttcaccataaatagtgaaaacagcaggatgatttttattgctgcaatgtgtaatcgaaaaatgtaaaattttttgtacgagaagtgattgctcttggttgagctgatggtaaggagagagtttaaaacttgcttgattattcaatatttattcacctcgttttcaattataatgaatagaaataataatgataaaggaagaaaacatgactgcacaaaaaataattcacgatcagctatttttaagacaaaaatctgatttagctggcaaaaatgatttacaagttgcgataaacttgcgtgatacgctactagctaatcgtgggaaagctgcggggctggctgcaaatatgattggtcagactaaacaaattatagcgttttatgctggcccgcttccatttgtaatgctgaatccacgtattattcaaaaaaagcagatgtatcttgctagtgagggatgtctgtcactagaaggcgagcgtaatgttcagcgctatgaagaaattactgttacttatcagaatatggagttagaaacagtaacgcaaacttttggtgactttatagctgaaacgattcagcatgaaattgatcattgcaatggaattttgatttgaatagtagaatatttacgtgattttgcaaaaaaagtaaaaaatttaaattaattttgcatggtttcagggatgaaaacccacaattttcgaataattagatttgagagaataaaatactttttaatttaatgcaaagataaaggaaaatatattacaacactacctagtgtatcgtgaagaacccgaacgaagagcaagacttgccaaagcagagaaaataaggtaaattaataaagtcgcttcgagagatgcgacgagagcttaaaaacagacatgtaaggaaagaaaacaaataaaaagaaaaaagtacttgcaaagaagtaaataagctggtaatatatttaaatgtcgtcaggtgaaagcagaaaaagcttgagcaagacgaaaaaacaaatcaaaaaagttcttgacaaagaaatgatggtttgataaaatataaaagctgtctgctttgcaaaaaaagcaagacagaggtagtactttgaaaactgaacaaagtttcgctaaaagtgtgcgggtgtaaaaacccaaacaagaagcgaagtcaattcgcaagcaataaatttgagacaaagatcttaaataaggaatgagcaatcattcaaactttttaaaatgagagtttgatcctggctcaggacgaacgctggcggcgtgcctaatacatgcaagtcgagcgagcggaactaacagatttacttcggtaatgacgttaggaaagcgagcggcggatgggtgagtaacacgtggggaacctgccccatagtctgggataccacttggaaacaggtgctaataccggataagaaagcagatcgcatgatcagcttttaaaaggcggcgtaagctgtcgctatgggatggccccgcggtgcattagctagttggtaaggtaaaggcttaccaaggcgatgatgcatagccgagttgagagactgatcggccacattgggactgagacacggcccaaactcctacgggaggcagcagtagggaatcttccacaatggacgcaagtctgatggagcaacgccgcgtgagtgaagaaggttttcggatcgtaaagctctgttgttggtgaagaaggatagaggtagtaactggcctttatttgacggtaatcaaccagaaagtcacggctaactacgtgccagcagccgcggtaatacgtaggtggcaagcgttgtccggatttattgggcgtaaagcgagcgcaggcggaagaataagtctgatgtgaaagccctcggcttaaccgaggaactgcatcggaaactgtttttcttgagtgcagaagaggagagtggaactccatgtgtagcggtggaatgcgtagatatatggaagaacaccagtggcgaaggcggctctctggtctgcaactgacgctgaggctcgaaagcatgggtagtgaacaggattagataccctggtagtccatgccgtaaacgatgagtgctaagtgttgggaggtttccgcctctcagtgctgcagctaacgcattaagcactccgcctggggagtacgaccgcaaggttgaaactcaaaggaattgacgggggcccgcacaagcggtggagcatgtggtttaattcgaagcaacgcgaagaaccttaccaggtcttgacatctagtgccatttgtagagatacaaagttcccttcggggacgctaagacaggtggtgcatggctgtcgtcagctcgtgtcgtgagatgttgggttaagtcccgcaacgagcgcaacccttgttattagttgccagcattaagttgggcactctaatgagactgccggtgacaaaccggagaaaggtggggatgacgtcaagtcatcatgccccttatgacctgggctacacacgtgctacaatgggcagtacaacgagaagcgagcctgcgaaggcaagcgaatctctgaaagctgttctcagttcggactgcagtctgcaactcgactgcacgaagctggaatcgctagtaatcgcggatcagcacgccgcggtgaatacgttcccgggccttgtacacaccgcccgtcacaccatgggagtctgcaatgcccaaagccggtggcctaaccttcgggaaggagccgtctaaggcagggcagatgactggggtgaagtcgtaacaaggtagccgtaggagaacctgcggctggatcacctcctttctaaggaagcgaaggatatggagagcaggaatgctaagagaagtatccagagcaagcggaagcacactgagaaactttgtttagttttgagggtagtacctcaaaaagagctagtacattgaaaactgaatataatccaagcaaaaaaaccgagacaatcaaagagaacagattgtagagcgaccgagaaaagaattcttgagtaaggtcaagtagaaaagggcgcacggtgaatgcctaggcactaacagccgaagaaggacgtgacgaactacgaaaagcttcggggagcggtaagtacgcagtgatccggagatatccgaatgggggaacccaatgcagagatgcattattgattagtgaatagatagctaatcaaaggaagacgcagtgaactgaaacatctaagtagctgcaggaagagaaagaaagatcgatttccttagtagcggcgagcgaagaggaaagagcccaaaccaagtgatttatcatttggggttgtaggactgcgacgtggcagtgtaagagatagttgaattatctgggaaggtaagccagagagggtgagagccccgtaagcgaaatctcaagcacgcctagcagaatcctgagtaggccgggacacgaggaatcccggttgaaaccgcgaggaccatctcgcaaggctaaatactagttagtgaccgatagtgaaccagtaccgtgagggaaaggtgaaaagaaccccggaaggggagtgaaaaagaacctgaaaccgtgtgtctacaagtagtcaaagcacattaaagtgcaatggcgtgccttttgtagaatgaaccggcgagttacgttatctagcgaggttaagtcagaaaagacggagccggagcgaaagcgagtcttaatagggcgaaaagttaggtgacgtagacccgaaaccaagtgacctacccatgaccaggctgaaggtgtggtaaaacgcactggagggccgaacccacgtaagttaaaaattgcggggatgagttgtgggtagcggtgaaattccaaacgaacttggagatagctggttctctccgaaatagctttagggctagcctcgtggagaggataatggaggtagagctctgtttggactaggggcccgtcaggggttactgaatccagataaactacgaattccagatatccatacacgggagtcagactgcgagtgataagatccgtagtcgaaagggaaacagcccagatcaccagttaaggtcccgaaatctatgctaagtggaaaaggatgtggagttgcgtagacaactaggacgttggctcagaagcagccatcattcaaagagtgcgtaatagctcactagtcgagtggcgctgcgccgaaaatttaccggggctaagcatagtaccgaaactgtggatgtgttttaaagagcacgtggtaggagagcgttctaagagcggagaagttgaatcgagaggatcaatggagcgcttagaagtgagaatgccggtatgagtagcgaaagataggtgagaatcctatccgccgaaagactaaggtttcctggggcaggctcgtccgcccagggtaagtcgggacctaaggcaaggccgagaggcgtagtcgatggataacaggtagagattcctgtactgtgtcaaatcgttaagagcgaaggagggacgcaggaggtgaagcacgcatcgcgatggaacgatgttcaagcaacaagtgcggttaagagtcaaatgcttctaaccagcaacacgagttgtgaagaggagtgaattaaaagtagcgaaggtgtggtaatcacactgccaagaaaagcttctagccagagatgacatacccgtaccgcaaaccgacacaggtagtcgagtggagaacactaaggtgagcgagagaactctcgttaaggaactcggcaaaatgaccccgtaacttaggaagaaggggtgctagccaagagattggttagccgcagtgaataggcccaaacaactgtttatcaaaaacacaggtctctgcaaaatcgtaagatgacgtatagaggctgacacctgcccggtgctggaaggttaagaggagagcttagcgtaagcgaaggtttgaattgaagccccagtaaacggcggccgtaactataacggtcctaaggtagcgaaattccttgtcgggtaagttccgacctgcacgaaaggtgtaatgatttgggcactgtctcaacgagagactcggtgaaattataatacccgtgaagatgcgggttacccgcgacaggacggaaagaccccatggagctttactgtagcttgatattgagtatcttttaaacatgtacaggataggtaggagccagagaagataggacgctagtcttattggaggcaatgttgggatactacccttgtttgaaggatgctctaacctcgacctgtaagccaggccagggacagtgtcaggtgggcagtttgactggggcggtcgcctcctaaagtgtaacggaggcgctcaaaggttccctcagaatggttggaaatcattcgcagagtgtaaaggtataagggagcttgactgcgagagagacaactcgagcaggtaggaaactaggacttagtgatctggtggtaccggatggaagggccatcactcaacggataaaagctaccctggggataacaggcttatctcccccaagagttcacatcgacggggaggtttggcacctcgatgtcggctcgtcgcatcctggggctgaagtcggtcccaagggttgggctgttcgcccattaaagcggcacgcgagctgggttcagaacgtcgtgagacagttcggtccctatccgtcgtgggcgtaggaaatttgagaggagctgtccttagtacgagaggaccgggatggacgcaccgctggtgtaccagttgttccgccaggagcatcgctgggtagctatgtgcggaaaggataagcgctgaaagcatctaagtgcgaagcccccctcaagatgagatttcctttgcgtaagcagtaagacacctcagagacgatgaggtagataggctgggagtggaagtcctgtgaaggatggagcggaccagtactaatcagtcgaggacttgaccaaagcgaagcaaactggaaggttttttgcgagaaggattatgtttagttttgagtgtaaaagctcaaaagagtacggtggcgaaagcaagaaggatacacctgttcccatgccgaacacagaagttaagcttcttaacgccgaaagtagttggtgggcaactgcctgcgaggaaaggaagctgccgtgctcttttttaatattccggcttagctcagttggtagagcgcttgactgttaatcaagatgtcgtcagttcgagtctgacagccggagtaaagggaagaaggaagcggaaggcttcctttttttgtgccttttgggtatgttaaaaggttaattaggctaagcaagcatgacttgagggtcaaatttaatataatcattaatagaagacatagtaaaactcctaacaagcttaattgaattgattacggaggctatgctctctttttaagtgcataaaaatcgaaactgtcaaatcttttgtgtaaatagatctttctcgtaaattgattttttaattatttatttaatcaaagtaggattctaaggtgtcctgaacctgaccaaagcctttatgaattcgattgaaataacggtcattgtagctcattgcctgaataccaataaaagcatcaagcgactgttcagttggaaactctgccttaggcttagctttacgcttgatgacgttgttaaaggattcaatcatattggttgaataaattgaagctctgatttgtttgggataattgtagaagactagcagatcgggctcaatttccttcaaacctttgatgacatggctataagctttattccatttggcatagaatttgtgcaagacagctgcagcttcttttttgcttgtctgttgatgtatctgcttgaattcgttcatgatcttttcacgatcgtcgacgcgtactttagcgcagatattgcgcatgacatgaaccaggcagcgttgaaaatgagctttaggataagtcctggccaaggctgttttcatgccaacaacaccatcagaaagaaaaagctcaacttgcttcaagcctctggacttcatgttttgaagcatctctgtccaaacttcaatgttctcactaggagcaatgcagtagtcaatgacttccttatgtccattaggtttaatgccaatggcaatatagactgcttcacgctcaaacgtttctcggcgcaaaggaaggtatgtcgcatccaaatagacgcagaaaaacttgtcgcttagcttgcgcttgtgataagcctcaaccttggggagcatctgcttggaaatatttgatacttgagctggactataatgactgccatacattttctcaatcaagtcagcgatttctctggtggttacgcctttggagtagagcttgataatcgtgctttccaaaacatcagagtgctgcttgtagtcaggcagcgtgtgctgatgaaactgaccgttgcggtctcgaggcacttgcacttcaattggtccaaactgcgtatcaaccttgcggaaataagcaccatttctagaattgccagtattccagccatttctggcatagggatcatagcctagaaaggcagtcaattcagcttctagcaagttattaacagcctgttgtagctctttgcgcaataaatcatttattttgtctggattgaatagagcttgagcaaaatctttggtaaaatcattcatgaaggagttcttctttctgtatgtgttttttttgttcaaaccaatcatacgagaaaggaactcctttttctaatgtttaaagaaataaatttaaggaatcattcatccttacacaaactattttacagtctctaaaaatcttatagatagattattataaatattcaacgacagtaaaattaggtaagcaatctatatctaggaatctgttggggttctgattgtagtaggctaattatacaaaaatgagttaacaaaattctgatcagaattagtacggttaagattgaaaaaatagctggtaattattactgtatctctttgtaattaggtaacaatgctattttttacttctaaaatataattaaaccggtcagacaattcgtattgacctgaatttggataaacagttataacaaaactatgtgtgcaaagcagatgacaggaacttttaattgatctcgtatgttggagcgcgctgtgttgactatttgttctaagtgaacagatgacaagcatgcctctatctaagtaccaagatctaggaaattcattctgaagtagttaatatgtgtcaatatgtcgcacaaaggtaactatgaattacagcaacataagagaaatttgaaaaatagtttttaaattgtggcttgttattagtgaaaatgataaattaaatattattttggcagaaaatacagcttaataacaaaaaataaaaatattttttgcttacctttaaaaatatagttcgagatttataaagtttttaacgagttaaagtgatatttctataattgaaagcagattctactaatgtaattactataatcagaataaatatttcataaaaatacatagaacccgaacgaagagcaagacttgccaaagcagagaaaataaggtaaattaataaagtcgcttcgagagatgcgacgagagcttaaaaacagacatgtaaggaaagaaaacaaataaaaagaaaaaagtacttgcaaagaagtaaataagctggtaatatatttaaatgtcgtcaggtgaaagcagaaaaagcttgagcaagacgaaaaaacaaatcaaaaaagttcttgacaaagaaatgatggtttgataaaatataaaagctgtctgctttgcaaaaaaagcaagacagaggtagtactttgaaaactgaacaaagtttcgctaaaagtgtgcgggtgtaaaaacccaaacaagaagcgaagtcaattcgcaagcaataaatttgagacaaagatcttaaataaggaatgagcaatcattcaaactttttaaaatgagagtttgatcctggctcaggacgaacgctggcggcgtgcctaatacatgcaagtcgagcgagcggaactaacagatttacttcggtaatgacgttaggaaagcgagcggcggatgggtgagtaacacgtggggaacctgccccatagtctgggataccacttggaaacaggtgctaataccggataagaaagcagatcgcatgatcagcttttaaaaggcggcgtaagctgtcgctatgggatggccccgcggtgcattagctagttggtaaggtaaaggcttaccaaggcgatgatgcatagccgagttgagagactgatcggccacattgggactgagacacggcccaaactcctacgggaggcagcagtagggaatcttccacaatggacgcaagtctgatggagcaacgccgcgtgagtgaagaaggttttcggatcgtaaagctctgttgttggtgaagaaggatagaggtagtaactggcctttatttgacggtaatcaaccagaaagtcacggctaactacgtgccagcagccgcggtaatacgtaggtggcaagcgttgtccggatttattgggcgtaaagcgagcgcaggcggaagaataagtctgatgtgaaagccctcggcttaaccgaggaactgcatcggaaactgtttttcttgagtgcagaagaggagagtggaactccatgtgtagcggtggaatgcgtagatatatggaagaacaccagtggcgaaggcggctctctggtctgcaactgacgctgaggctcgaaagcatgggtagtgaacaggattagataccctggtagtccatgccgtaaacgatgagtgctaagtgttgggaggtttccgcctctcagtgctgcagctaacgcattaagcactccgcctggggagtacgaccgcaaggttgaaactcaaaggaattgacgggggcccgcacaagcggtggagcatgtggtttaattcgaagcaacgcgaagaaccttaccaggtcttgacatctagtgccatttgtagagatacaaagttcccttcggggacgctaagacaggtggtgcatggctgtcgtcagctcgtgtcgtgagatgttgggttaagtcccgcaacgagcgcaacccttgttattagttgccagcattaagttgggcactctaatgagactgccggtgacaaaccggaggaaggtggggatgacgtcaagtcatcatgccccttatgacctgggctacacacgtgctacaatgggcagtacaacgagaagcgagcctgcgaaggcaagcgaatctctgaaagctgttctcagttcggactgcagtctgcaactcgactgcacgaagctggaatcgctagtaatcgcggatcagcacgccgcggtgaatacgttcccgggccttgtacacaccgcccgtcacaccatgggagtctgcaatgcccaaagccggtggcctaaccttcgggaaggagccgtctaaggcagggcagatgactggggtgaagtcgtaacaaggtagccgtaggagaacctgcggctggatcacctcctttctaaggaagcgaaggatatggagagcaggaatgctaagagaagtatccagagcaagcggaagcacactgagaaactttgtttagttttgagggtagtacctcaaagatttgaaaaacgccaagcgttagtcgggcctatagctcagctggtttagagcgcacgcctgataagcgtgaggtcgatggttcaagtccatttaggcccattgacataacgaagaaaaagagttaaagttatgtctggccgaaaataaaatactttgggggcttagctcagttgggagagcacctgctttgcacgcaggaggtcatcggttcgaacccgttagcctccattgatccagaaaaaggatcaaagagctagtacattgaaaactgaatataatccaagcaaaaaaaccgagacaatcaaagagaacagattgtagagcgaccgagaaaagaattcttgagtaaggtcaagtagaaaagggcgcacggtgaatgcctaggcactaacagccgaagaaggacgtgacgaactacgaaaagcttcggggagcggtaagtacgcagtgatccggagatatccgaatgggggaacccaatgcagagatgcattattgattagtgaatagatagctaatcaaaggaagacgcagtgaactgaaacatctaagtagctgcaggaagagaaagaaagatcgatttccttagtagcggcgagcgaagaggaaagagcccaaaccaagtgatttatcatttggggttgtaggactgcgacgtggcagtgtaagagatagttgaattatctgggaaggtaagccagagagggtgagagccccgtaagcgaaatctcaagcacgcctagcagaatcctgagtaggccgggacacgaggaatcccggttgaaaccgcgaggaccatctcgcaaggctaaatactagttagtgaccgatagtgaaccagtaccgtgagggaaaggtgaaaagaaccccggaaggggagtgaaaaagaacctgaaaccgtgtgtctacaagtagtcaaagcacattaaagtgcaatggcgtgccttttgtagaatgaaccggcgagttacgttatctagcgaggttaagtcagaaaagacggagccggagcgaaagcgagtcttaatagggcgaaaagttaggtgacgtagacccgaaaccaagtgacctacccatgaccaggctgaaggtgtggtaaaacgcactggagggccgaacccacgtaagttaaaaattgcggggatgagttgtgggtagcggtgaaattccaaacgaacttggagatagctggttctctccgaaatagctttagggctagcctcgtggagaggataatggaggtagagctctgtttggactaggggcccgtcaggggttactgaatccagataaactacgaattccagatatccatacacgggagtcagactgcgagtgataagatccgtagtcgaaagggaaacagcccagatcaccagttaaggtcccgaaatctatgctaagtggaaaaggatgtggagttgcgtagacaactaggacgttggctcagaagcagccatcattcaaagagtgcgtaatagctcactagtcgagtggcgctgcgccgaaaatttaccggggctaagcatagtaccgaaactgtggatgtgttttaaagagcacgtggtaggagagcgttctaagagcggagaagttgaatcgagaggatcaatggagcgcttagaagtgagaatgccggtatgagtagcgaaagataggtgagaatcctatccgccgaaagactaaggtttcctggggcaggctcgtccgcccagggtaagtcgggacctaaggcaaggccgagaggcgtagtcgatggataacaggtagagattcctgtactgtgtcaaatcgttaagagcgaaggagggacgcaggaggtgaagcacgcatcgcgatggaacgatgttcaagcaacaagtgcggttaagagtcaaatgcttctaaccagcaacacgagttgtgaagaggagtgaattaaaagtagcgaaggtgtggtaatcacactgccaagaaaagcttctagccagagatgacatacccgtaccgcaaaccgacacaggtagtcgagtggagaacactaaggtgagcgagagaactctcgttaaggaactcggcaaaatgaccccgtaacttaggaagaaggggtgctagccaagagattggttagccgcagtgaataggcccaaacaactgtttatcaaaaacacaggtctctgcaaaatcgtaagatgacgtatagaggctgacacctgcccggtgctggaaggttaagaggagagcttagcgtaagcgaaggtttgaattgaagccccagtaaacggcggccgtaactataacggtcctaaggtagcgaaattccttgtcgggtaagttccgacctgcacgaaaggtgtaatgatttgggcactgtctcaacgagagactcggtgaaattataatacccgtgaagatgcgggttacccgcgacaggacggaaagaccccatggagctttactgtagcttgatattgagtatcttttaaacatgtacaggataggtaggagccagagaagataggacgctagtcttattggaggcaatgttgggatactacccttgtttgaaggatgctctaacctcgacctgtaagccaggccagggacagtgtcaggtgggcagtttgactggggcggtcgcctcctaaagtgtaacggaggcgctcaaaggttccctcagaatggttggaaatcattcgcagagtgtaaaggtataagggagcttgactgcgagagagacaactcgagcaggtaggaaactaggacttagtgatctggtggtaccggatggaagggccatcactcaacggataaaagctaccctggggataacaggcttatctcccccaagagttcacatcgacggggaggtttggcacctcgatgtcggctcgtcgcatcctggggctgaagtcggtcccaagggttgggctgttcgcccattaaagcggcacgcgagctgggttcagaacgtcgtgagacagttcggtccctatccgtcgtgggcgtaggaaatttgagaggagctgtccttagtacgagaggaccgggatggacgcaccgctggtgtaccagttgttccgccaggagcatcgctgggtagctatgtgcggaaaggataagcgctgaaagcatctaagtgcgaagcccccctcaagatgagatttcctttgcgtaagcagtaagacacctcagagacgatgaggtagataggctgggagtggaagtcctgtgaaggatggagcggaccagtactaatcagtcgaggacttgaccaaagcgaagcaaactggaaggttttttgcgagaaggattatgtttagttttgagtgtaaaagctcaaaagagtacggtggcgaaagcaagaaggatacacctgttcccatgccgaacacagaagttaagcttcttaacgccgaaagtagttggtgggcaactgcctgcgaggaaaggaagctgccgtgctcttttttaatattccggcttagctcagttggtagagcgcttgactgttaatcaagatgtcgtcagttcgagtctgacagccggagtaaagggaagaaggaagcggaaggcttcctttttttgtgccttttgggtatgttaaaaggttaattaggctactattattggatattcatttatcatttaaaattgatctgggtgccgttaatcggattaacaggctatgtaattaggttatatcaccgattattgccacagaataaaaaatcttcaaattataagaatatcggtattatatcagtttacaaagtaatatttataatgtttgtatgtgttaaacgcaatcaattatatgattataatgtaatcatcagtaattaaagactgtagttgaatcaaataattaactcagcgtataaaatgctgagttagacaaaaaaacaacgagcaattctctcgttgttttatggattcattttgatcaaatttttagtttatctttagttgtaaataccaacttgattaatgtgggccaattccagaactggagattgagcgaagtccagactaacatcacagccagcatggataccattattttcgccattaagccagtgggtattattagttacgtcatagacagtaccattaaatgcaatataagctggacgtccatttttaccattgtaatttgatagagtttctttagtaaattttctcatataagaagctcctttctaataagatcttgatatattaatggtaacactgtgtcaccttatagcaagagatacgaaggagtcttatgcttttcttatgaaaaatgaccacgccacccagcaatatcccaatctagaaagtcataattaagctttttaccataaattttctcgtaggcagcaactttttgtcggtagtcgagttccatcatcttatgagcgttttcgttggcgtttagagaaacgtcagggaagattggtggtaaaacatggacaatatatttggtctcataaaaattaggatctttcttttcgattttaggtagatccttaatctcgacaaaagtggagattaccggtacattttgtttagccgcaaaataataggcaccacgttgtaatttgcgaggcttgcgataattccaccacatctcctgttctggataaattaaaacccaattatttttagctaaagctgcactgaggtgcttaggaaattcatttccaatatagctaggactctgaactagtggaatagtgccaacataattcattaaatagcggaaaaatcccggtagcattaggttagtatcttcaattacaattgaaagttgatggtgcatcttgttagcgagcagcttcattggtaaagaatcaacctgattgtagtggttagaagttaaaattgcgccaccaataggtaaattatttaggttctctaaacctacaaattcagttgatccagctaatgctctggataaagtaccaaataagagatgtccaatacgattattaagcttacttgaaaaagtgttacgcttattccaataatcattgaccaatttaaggcgctgatctagggacatttggggatcgccgatttctacttttgctgtgaagttgcgttcattagcagctttttttatatttttaatcactgcctcacgattatcgccaaaaatcatagtgttactgcctctcgtttcttaacttttgcccaattattaggatcttgctcagttttgtcttccttagcaagcatatgatccaatttttcgcggtctgctgcacgctcgtcatcagtataattattgagttcgttctttaattcatcgaaaaactgcgtttgtttggcactatcccagaagtactgtgcatattggacattagcaaaatgccatggcttaaagaaaagattatagtgaatcagaccaggattagttaaaggttcagtgttttcatttggcatagcatcccagcgaggatttaagtgcaaaattctaccttccccgatttcatttaaatagtcttgatcaggagcaatacaatcaaaatgatacttttctaaaagtgtcataaaatggtcaataaaatgttcagcgcgaaaggccctagcattcatgacgagcatgccagagttaatgtatttcttggggtcaagtgccaggacatttttgatgtattttatcatcttgtctacatattgaattgaggagtcggtgcaagcagcaaataaattatcacccaattcggagttgtatagtttagcaagatcgtcgtttacaattgtgtcgctatcaatatagatcaccttatcatattcgggaaaaagttctggaataaagaggcgataaaaaatcgacatggtaaaaaagtcagcgcgaagaaagttttccttacgattttgaataggttgtacaagttgattatcaatatggaaaaacttcacatgaacgtttggactgctaagatcagacaaagctttttgatgctttgatgagagattttgatttaaaaagtaaacagtataatccttatttggatctgtatgtttgactaaagaattaagagaaacagcagcgtatttggtaaagtcatcgctgatactgtaaaaaataggaattgtcataaaattgcctttcttagattttaactgattccgtttgtttaaccttagcccaagtatttggctctttgacaatcatgtcaactttttttgccatccattctaggtcagctcgggccttttgacggtcttcatcagtaaagttgtctaattgctgctttagttcatcgtaatacggcgtagttttagcaacataccagaaataatgaccatattgaacatcagcaaaatgccatggtttgaagaaaagattgtagtgcacgatcttaggatcttgaatttcagaatgctttcatttggcatagcatcccattctttaggtaggtgataaatcttatcttcgcaaatttcattcatgtaggcttgatcagggtcaacgttatcgaaatgatatttattcattaagtaatagaatttatcaacaaactttttgtctctaaaggccttcatattaaacagaattacaccattattgatgtatttttctgcaggaaaaattccctgacattctttaatgtacttttgtaaaagtggcatgtaacgaattgataagtcgggacatgaagcaaacatgttgtcggcgatatcaatttcatacattttagcaatatcagtacagataatagtatctgcatcaagataaactgccttgtcatattgagggaacaattctggaatgaatagtcggtaaaaaattgacatagtaaagaattgagcacgcaagtagttttccttagtattgtgaattggcttaaccatgtcatcgtcaatatgaaagatttgaacatgaatattatcagttgaaagatcttctaagctctttttgtgctcatcagatatctgttggactaaaagggtaatcgtatagtccttcttggggaaactgtcaaatcttttgtgtaaatagttctttctcgtaaattgattttttaattatttatttaatcaaagtaggattctaaggtgtcctgaacctgaccaaagcctttatgaattcgattgaaataacggtcattgtagctcattgcctgaatgccaataaaagcatcaagcgactgttcagttggaaactctgccttaggcttagctttgcgcttgatcacattgttaaatgattcaatcatgttagtcgaataaattgaagctctgatctgcttgggatagttataaaagaccagcagatctggttctatgtctttcaagcttctgataacatggctgtaaaccttgccccatttggtatagaagtcatgcaggacagctgtggcttcttctttgtttgtctgttgatgcacctgtttgaattcgttcatgatcttttcacgatcgtcgacgcgtactttagcgcagatattgcgcatgacatgaaccaaacagcgttgaaaatgagctttaggataagtcctggccaaggctgttttcatgccaacaacaccatcagaaagaaaaagctcaacttgctttaagcctcgggatttcatgttttgaagcatatctgtccagacttcaatgttctcgctaggcgcaatgcagtagtcaatgacctccttgtgcccattaggcttgatgccaatggcaatatagactgcttcacgctcaaatgtttctcggcgcaaaggaaggtatgccgcatccaaatagacgcagaaaaacttgtcgcttagcttgcgtttgtggtaagcctcaacctttggaatcatctgcttggaaatatttgatacctgagctggactgtaatggctgccatacatcttttcaattagatcggctatttccctggtggtcacgcccttggagtaaagcttgataatcatgctttccaagatatccgagtgctgcttgtagccaggcagcgtgtgctgatgaaattgaccgttgcgatcccgaggcacttgcacttcaattgggccaaattgcgtatcaactttgcggaaataagcaccatttctagagttgccagtattccagccatttctggcatagggatcatagcccagaaaggcagtcaattcagcttctaacaagttattaacagcctgttgtagctctttgcgcaataaatcatttattttgtctggattgaatagagcttgagcaaaatctttggtaaaatcattcatgaaggagttcttctttctgtatgtgtttttttgttcaaaccaatcatacgagaaaggaactcctttttctaatgtttaaagaaataaatttaaggaatcattcatccttacacaaactattttacagtctcttcttggggtcagtatggtcaattaatgatttaattgaaacatatgcatatggcgtataattatcgctaattgtgtaaaaaacaggaatggttttcaaaataagatcctcctaaattatttttttaaattatttcgtaatttgagatattcgttaagcaaatcatcatattcatgtaaatgaagtacactgtgtacgcgatcaacatcccatggcttaactgtttgagtatggaaataaggccaaaacctaaagctagtagtgaaatgttgaattttggtgtttttttgcaaatgatattgctcattataacggcgtggtgctactcgcttggctacagctagcttgtttattgctgattggtcgggcaaaaacatttgcttaacctgcatcatatgccgcatctcggcaaagagatcagtttgcttaattttcttcatattcagcaacaaaacgccagaattaagataatcaaatgcgcgcttggtcttaagattgtggaagaagaagcggccccaataatcaagtacgcccactaattcgattccggtaatatcctcattgtaaaaagttgtaatatcaccgcgaatgacaatgtcatcgtctaaataaagaatgcgatcaggaatctgtggcaattggtctgcaaataaacgcaacatagcatatggcgtgaagcgagtattcatgttagcggttggcggttcctgttcaaataacttggtgcagtcaattaattcaactgtactgttaggattggctttttttactaaagaacgtaaaaaatcagccgcatgttgtgagaaagggtgatatttacgttcatcactgtgtgcctccatcgttaaaatataaagatgcaattcttgagcaccagaatttttgattaaagataaggtggaaatcaaaacgccatcttgagcattttcatctccacaaaaaagaatattcatgataaactcctattttttatttcttttgaatatattgacaatattcataatcgctattttttgcacgctgcttcattacctgccaaatttcatcgtgaagcttattttgagcttccttacggcttaaatttgtatccgggtaaaagggcccatcaatgtaaataacggcactaggccgcttgctaagccactttttatggtaggttttggtcatgacgaaactaggcgcatttaatttaactggaaagtgcatgcttgttgcatcgaacgggcgaatcttcgtgtaatagggccagacatgagcttcagggtagatgagaatctcgccctttttatccttaatcacagtttgaatggctttaattagtttgagcgattgcttcatatttttgccaacaggcagaccgccgtagcgtacaagatatttgccaatgaaggggatgccccagttagcttgattagcaatagcataaaaatttttgattggaaaaattgtgagcgaggtaaagacatcccccatgggtctagtatggttgccataaataaaatagcccccattgacttgcttaagtttttcttgaccaacgacttttacatgatcgaagaagcggaaaaccacccaaccaaaagtgcatgctaagtgacgagcggtagtggaccagattctagctccaagagaattaggtagaataacgtaattatcgggtagactgaaattttgatcgtgactatcgactacatcatcggttgttttttggtaataataaatccgtttcatcttgccctccatgatacttatgtatcctatgataccatggaaaaaagcctaattcctaagacgagaggaatgctgaaagaaaataaaaaagattcgtaatttcatgatcgaaaaatacgaatcctctgtaaaatagcataaaaaaagcaccgccttcttgcagtgcatctttcatattatgggtggccaggggatcgaaccctggacccacggattaagagtccgttgctctgccagctgagctagccacccatatttgttcatcagctcccgccgacatttaaatatattaccagtagttttataatttgacaagctttttttgaaaaaagttgaaaaataatttgaagctagcaaaaagcgcccataatggccgcttttttactaaagtttatcttgaatatgataggctgtgccttgctgatcctgcttcatgtgatctgcatagtaaacagcatagacaccgctttgatcatttttggcaatcacaatttggcgccctgttggacgttctgccttaatgatttgagcactgcggcgtgcttctttaaagtcgtgtgaagatgcgatggcatcccctggattaaaaaatacagcttcgttcattgtaaagccccctcgtacaaattctaattttattttaccaagaaagccctttctaaatccaatttaagaaacaaaaaagagataagatcaacatcttatctcttacgaaaaatattatgggtggccaggggatcgaaccctggacccacggattaagagtccgttgctctgccagctgagctagccacccatgtcgttgaatcaatcaacagatattattatgctattgttgataagaaaatgcaagctttttttgaaaaaaaacaaaaatttttggctaatgttacaaaattcagtataatgtaagggcaaaggaggcattcccgatgccaaagaagattctcgtcgtcgacgatgaaaagccgatttctgatattatcaaatttaatttaactaaggaaggctttgatgtcgacaccgcctatgatggcgaagaagctgttaaaaaagttgacgaatacgacccggatctaatgattctggatttgatgttgcccaaaaaagatgggttggaagttgcgcgtgaagttcgtcaaacgcatgacatgccaatcatcatggtaactgctaaagatactgaaattgataaagtcttaggactggaaatgggtgcagatgactacgtaaccaagccgttttctaaccgggaattagttgcccgtgtgaaggctaacctgcgtcgtcgtgatattgttaaaaaagcagaagctgccagccaagaagagaccgataagaatattaagatcggtaacttggtcattatgccagatgcctatattgtagaaaaaaatggtaagaagattgaacttactcaccgtgaatttgaacttctttactatttagctcaacatatgggacaagttatgactcgtgaacacctgcttcagactgtttggggttatgactacttcggtgatgtgcggactgtagacgtaacggtgcaccgtttaagagaaaagattgaagataatccaatccaacctcaaattttagttacccgtcgtggtgttggctattatgtaaaacagccgagtgaagaataataaagaaagccacagaactgttatggtagtggctttcttttttatattttttagatattgaatgagtagaatgaaaaaattcaaagcaagattaaatagtacatttaattccattaatactaaaattgcaattgtgttcatgctgatgctactgccaacaattgaagttattggagcttattttacccgtcaattagagcaaaatagcattgaaaatttccaatcatcaatccagattcagactatcgtcagcaatcagttagctaatcagttgaccagtgataataaaaatactaatgatcgcttgaatcaaattgttaatgactacaataatgatgcaattagtgaaattattgttgtcgataataaggatacgattcgtgccgtttctaacttaaatgataaaagtaagatcggtcaacggattaacaatactgatgtgaagcaggttatttcaactggacatcaaattaataaagtggtcgatgatcatggcaattacatgattcaaatatcgccgttgactagtggcaatggctctaacaatactgttggtgctgtctatgttaaagctagtatgcaagatgtctttaacaatttgcgccaaatttcattgactttcttgattgcgtcattgatcgcggctttattaggtgcatttttgtcattggttatttcccgggcaattacgcaaccgatcgaagaaatgcagaaacaagcattgcatattgctgatggtgattattcaagtcaggtaaaaatttattccaatgatgaactagggcaattagctaaagcatttaataccctgtccgtacgaattgaacgctcacaagaagagtctgatagtgaacggcggcgactagatagtgttctgtcacacatgagcgatggagttctagccactgatcgtcatggtaacgtcagtgtggttaatcatatggcactaaactttttaaataaaaaagaagacgaggttatcaataagccgattgctgaagtactgggactagaagatacttcgtcacaagatttgatttctagtcaaaaagagatcgttattacccttgatccaggtacgcgggatgaaattattttgcatgctagtttttctttgattaagcgggtaactggctttgtatcagggtcagtttgtgtattacacgatgtaactgagcaacaaaagaatgaagattcacaaagacagtttgtttctaatgtctcacacgaattgagaacacctttaacaagtttgcaggcttatattgaagctcttaatgagggtgcttggaagaatccagagattgctcctaagtttttggaagttacccaacaagaaactagtcggatgattagaatgatcaatgacttgttgagtttgtctagaatggaccgtggcgtttcaaaaatggatctagaatttgttaacttaaacgattttgttaaccatattcttaaccgtttcgatatgattgttaaaacagataaaaataaagaaaagaagaaatacacaattaagcgtgaattaggcagtcaagccttatgggtggaaatcgataccgataagatgatgcaggtaattgataacattatgaacaatgcaattaagtattcacctgatggcggtgtaattactgttagaatgacccaaaaccaaaatcatgttatcttaagtatttctgaccagggcttgggtattccaagaaaagatctgggtaaaatctttgaccgcttttaccgagttgataaggcacgttcccgggcccaaggtggtaccggcttgggcttggccattgctaaagaaattgtggaagctcaccatggtaaaatttgggctgacagtagcgaaggcaaggggtctactttctatatttccttgccatatgaaccgatgacagaggaggatgattgggatgaagtttaaattcaaattcggtgaatttttcttaggcttagctacactgatcgtcattgtcctctcaattgtgctttggatctttattatgactagtgatcagcgctttagtaatattggtcagcaaaatcaaaataatatcactaaagagcaaacgcgtagtcacaattttaagtcattatatgatttatatattccaactacttcatatggttttgctaatggaaatttgtgtcagctatatgattcaaaaaataatttgactttagaatttaccaaagagataaaaaaagccaaggccactaataaaattaagaaaatagttgatactagaactaaatatgaagagtatttaaacaatcccaactatgtgcagttggtttatccagatgaaattactttctccttatttaaccagttgaataatgccgcaaatgataaccgcgagtttaaccgcttctttatctcgcagtcaaatcactggatttatttgggaaatgatcagactaatgaaatttatcaagtaaaaattgctggcgcaaattttgataaactacgtaaatatgcacgtaatactaagagcaagtatccagttagattagttcgtttaaaggaaggctattcaccgttttacatcaagacaatgaatgctaaagtttatagttacttgactaatcatcaatcgtattcttactttgtttcgcgtttattaggtacatctggcgttactagtaagactaataagaatggtcaaacggtatattctttgaactactatactcgcttaagagtgccagattctaattcaggtgagcataattatctttatactcattatgaaaaaaataagatccccaatactactaaccgcttattagatagcgtttattatgttcaccaattgggtttaaccgagcaagatttacgcttctttgatgcagatggtgctaatgttagttatctaaactatattgaaggtattcctgttttcttaaataagcatgatttgcaagtcaagacgaccttttcaacagattcgattaatgtggcctttaatagtgtaaacttccaaattccaattccgtttgatggtcaaactaagcggttaaaaccaacccaagatgttgttgatgaattagtcaatcacggcctaaagcaggaagatattcaacgaattatcgttggttttgctgaagaaaaggattcaagtcaccatagtttgattaacttgatcccaacgtactatatcaaagcctacgatgaatggaagagcctaggtgaatgggaaaagcaagacgtatctacctaccgtgaagctgatcagttaactgttaacgaagggggaaaatagaaatggaccataaacgaatcgaatggctatttttcgttgttttctttttaattgatatttatcttggaatcgaaattctccgttctcccgttaatttaagtaacgctgataccactactcgtagcgttgctagcatccgcaatgaaatgaagtcagacaatattgatttgcccgataagatttcggatgcaccagattctggttattatttagctaccaagaatcgtgactatctctctggcaaagttagctcgctgactaatgtaaatgcccgctattctaaaagcgataatgtgctttatggtgaaccaagacaagcagtccttttgagtaaaaaacctaaggaagctttagaacaaattgaagattttaagaatgattcgaaaaatattccttatggtaaagaattcaagtatgaacctgatatgtcgagtgaagacaattatgtttttgtgcaaaactcagattatggtgaaatttatgctaactcggcccaattgaatatcaatgtaaaagataatcagattattaattttactgaaacatatatggggcaagctagtccagtgcgtgaattacagtcaaccatcagtgcttggcgtgctgtgcgtgcgatgtacactgatcgtgagttgactaataattcgcgcgtaacgcaggtaaaattaggttactccaaactgacagaagtacgtggcagcacaatcttgttgccaacttggctggtttgggtagaaaataagacaactaaaaatatcacgatgaaacgtattaatgcatatacggcacagatgctacaatcgagtacctataatgtagaaaagtagaagggacaaaaattgaaggtttccgttttagcaagcggctcgaccggcaataccagtttaatcgttacaggccagcataaaatcctgatggatgctggcatttctggtaagaaaactaaagatttgctagccgaagttggagttgatattaacgagattgatatggcctttttaagtcatgatcataccgatcatagtggcggactcggcgtgttgatgcgccgttatcctaagatagatgcttttgccaatagtgggacttggcagtatttattggatacgaaaaaaataggtaaattaccggctgaacaaatgaatacaattgaaccaggccaaactaaaacttttggtgatgttgatattactgcctttgcaactagtcatgacgcagctgagccgcaatattatgtgtttactagtggtggtaagcgggtcgcttttttaactgatacaggttatgtatcagaagaagttgaagggacaattgaagatgctgatgcctatatgatggaatttaattatgataatatgatgctcagagatggaccatattcctgggcactgaagcagcgaattttgtcggatgtaggccatttatctaatgacgaagcagcccaggcattagttgatgtagtcacacctaaaacaaagcatatctttttagcgcatcgcagccaacataataatacggagtatttagctcacgaaacggcaaaggaaatgctgcttgagggggatgcaaatttggatgatgatgttaagattattgatacagaacctaatcagcctacaaaattagttgaaatttagcagttttcacaacattttttcatataatattcaaatttaatcggtatgattagtaaacaagatgaggggagaagcaagtatggtagaaaatcaaaataataataacaatttacaacaacctagaaaaaagaatactaatggtaaaatcattgccactgcagcgattgtcggtgtagttggtggcttgatcggtggaggcgtttcatattacgcagctgatcaaatgaataatgcatcagttaataatggtgccgctcaaactagtgtatcttcaagtagtagtaaagtttcagaaaagagtgctaagactagtggcacaatgactactgcatataatgatgtaaaaggagcggttgtttcagttattaacttaaaacgccaatcaagttctaatagtactaattcactttataatagtttattcggtaatgatgacagtgatgatagctcttcatcaagcagcaagggcaagcttgagacttacagtgaaggctcaggtgtagtctacatgaaatctaatggcaagggctatatcgttactaacaaccacgttatctcaggcagtgatgctgttcaggtaatgctagctaatggcaagacagtaaatgctaaagttgttggtaaggatagtacaactgacttagctgtgctttcaattgatgctaagtatgtgactaagacggccgaatttggcgattctaagagcttacaagctggtcaaactgtcattgccgttggttcaccattaggtagtgaatatgcttctacggtaacgcaagggattatttcagcaccggctagaaccatttctacttcatcaggcaatcaacaaacggttattcaaactgatgccgcaattaacccaggtaactcaggtggtgccttggttaactcagctggtcaagtgatcgggattaactcaatgaagttagcccaatcaagtgatggtacttctgtcgaaggaatgggctttgcaattccatcaaacgaagtagttacgattgtgaacgaattagttaagaagggtaagattacccgtccacaacttggcgtaagggtaatcgcacttcaaggtattccagaaggctacagaagccgcttgaagataaattctactttgaagagtggtatttacattgcctcagtaaacaagaatagttcagctgctaatgccggaatgaagagcggcgacgttattaccaaggttgacggcaagaagattgatgatgtggcatcgttacacagcattttatacagccataaagtcggtgataccgtaaatgttaccgtgaacagaaatggtaaggatgtcaacttaaaggtaaaacttgagggtaactaaaaatcaaaatagaagttaattaaaagaaaaaaggctatatcacgcggtttaaacgtagatatagcctttttgttaactttttaaatgtgtaacatcaaattgttcggaattattcgttgtcaaacagacaccagcctgttgataagtgtggataactctgtggattgtgtataacttgctaaatataggtttattaacttgtggaaaaatatgatgattttgaccttatttagtgaattctatttgagaaaacaggcgttcatgcaggtataacaagccttaagagataaagtttgtgaaaaaaggctttcataaaatcgatgtgaataaagaaattttagaaaaattattaaatacaacttctggggtataagtaaaataataccacaaaatgttgaaattggtctttgaagttttgtggaaaagtttgggtaaatagtgtggaagggatgttagtattgtgctggtagattaaaattatgaatggaaaattagctatgcttgttataatagaagcatgaatatcaaaattgtatgtgttggaaaattaaaagagaagtattttagggatgcaattgcggagtatgagaaacgactcagtcgttttgcaaaggtgtccattgtacaggtgcctgatgaaaaagcaccggaaaaattcagtgcagctgaagatgagaaggttaaagagattgaaggtcagcgaatcctgagcaaaattaaagataaggagtacgtgtatgtgactgcaattaaaggaaagcagcgcagcagcgaagagttcgctaaagagattcaggatctcgcaacttatggtcattcagacattacgtttgtcattggtggcagtttagggactagcgatgctgtaaacaagaggggaaatgacttgattagttttggtaaattgatgatgccacaccagttgatgcgcgtggtgttgattgaacaaatctatcgtgcatttatgattaactcaggtagtccttatcataagtagaatatagaaaaagcccataaattgggctttttatttttgcatatttgcagatttcacaagcatattgaaaaaaactgtggcaggtcagtgcttttttagttttttatgattcctgaattgtcaaattaagtgcaacagttaggctatgaggaaatatattgcttgaagagttcttctgctgtgtgatattggaggattcggcgatatttgtggttaatggcatcagttgcctgttgaacataagcttttgacttgtctttcatgctcttgcccttagggaagaattgacgcaaaagaccattgcagttctcattggtgcccctttcccatggagaatatgggtgagcaaagtaaatctggcagcccttgatcttggtcatatccgcaaactcagagccattgtcaaacgtgattgatttaaaccaggcaggatgtctgtcaatctccttttgaagcagcctttggcatgtgcttgcccgatagtcaggaatcttgataactacttcaaagcgtgtggttctttcagtcaaagtcattaaagcaggctgattcttgcgtctgacgcctttaaccagatctccttcccagtgcagcggagcttttctgtcttcaatctctttaggacgctgttcaatggaattgccaagatgcttcttgtgcaaagcgtgaccgccatggctgtgatgacgcttgttcctgcgtcttttgagcttcataggcagatcaatattgcttatgtccagcaagccctgatcaatatagcgatagacagttggtgtgctgggacaagggtagcctggcatagtccttttgaattcaccaacgaactcatcgatgctggtggcatcaaatttagctttaaagcgtctggagagcattctcaaaaagacagcataatgcttcaatggattgcgctgatagcagtttttgcgacgcttctcataataaatctgtgcagtatcagcgtaatagtgctcatacaataaatagctgctgtctctttgcaggacacttccgcgtttgatttcgcgactgattgtcgacttatggcagccgacttcttgagcgataacagtacgggaagttatgccggaatccagcattgcttgaatttgtccacgttgtacgctggttaattgatgatagtgcttagaaatgctagaatttgaattggtcataaagatcttcctttcttgatttttcgtcacttcaagtttaggtcttcatggcctttttgtttaacacttagtgttgcacttcaattttaaatccggggttttttatgatttaaaaatagattttgttaaattatgtttggcaacaaaaaagacgatctttcgatcgccctgataatttttgagctaccagctagtagctcacgcacacgctgaagtgtactttatctttgtagtatctcaattttaacacataaatggtaaaattaaaactgcacgttgaagggggtaagtgtcaatgtttttgcggtagcctttaaaccattagtctaaccttaatttcttaaatatttatatgacttaaatttctgcttagcttgcttaaataactattgccagctacctgtgcggttaatgcgccatgctggatgcctaaatgaacttcatgacgcttctttaagctgtcacgggccgctgcttttaattcctgttcagtcaatacagttatttctgaatcttcaaactcgctgctaagccaaaattccagctctcgattcttgatgcagcttaagatcctaagcatgccttctgctccagattttgaccatttcttgccttgccccttaacacggtaggtatacttgcggtggttgctctcgcagcagccaatggctttagtcacagtcagttttcgtttcttaaacggcttaatatcgtcccaatgacgatcaatataattccttaggcgccccagataatcatgattgagctcggtattcaattcatcaattagtcggctttctgcagtggttaggatagttttaactttgtcatagctgtatttgtattccaaagcagaaatcagcttgccttgcaggtcaggcgcaaaatatagcctttctttgattttcttatttaggtgaaagacatccaagaaatgctcatgacgcttgcatagccctacaatgtcatcgaagtctgttttggcatatccagcaccgccatcggcgttgctaagaattacagtatcagaaagatcataagtattggccaggtactccttggcttcgttcagcgcatcaagtcggcttaaagaaacaaattccttggcattgattcgctttctgcgtttcttgcttatattgacaatgccttcacagacctgatagcgatgaaattccaaccggcttttagtgcctttgatcaccacgccatcgccttcaagatacaaaactgggacctttttcttagtgcctgcggcatcatatcttgaatctgcttcttggcccgctttaatatttttcccggccatttttaccaaattgcccacctgcatatggctaatattaaagccagacaggcaattgactgctagagcagtattgcgataagtggcaacgctgcttacttctaagatgtttttgactgctaaaatactgtagcgcttgtatttgtcaaagcccattaattcatccaagggataccttgcttgtttgcctgggcagacatatcttcttctgacatacctaacttcgccaaaagccatattgattgagcgctcattcttcttatcaatctgatagccctgtgctttaaccttggtaatcatttcatcatcaactttagctaaagccaaggccatgatttccttaatcaggtttaagaagaaacagattatttttctttcacgcttaatataattatcttcagactttataatatttgcgatttcagttacaattgaattcataaaagaccagcttctaatgtgttttttgttcttaacatcagactactggtctttttgtttgagctcaagtccaaattcaaaggacttgggcttttttaattatttattcaacttaccgtaaaaaattatacacttagttgaaggggtagcgcccttactcgtgtggaaggaggtagactcccatgaagtattactttatctttgtagtagtatttctaccactgaatcgtgatggcaagtgcttcaagaagctcaagaaggctattaaaaagttcctcaagaacctgattgatagtttctttgattaatccgatccagactcaatacagccgtccttcggggcggctttttttatgatgaaaatggcaagtcattgggtgaaaagtattacgcatatcgtgcagtaactgtaaatcaaagtcccataacaattaatggcgctaaattctacaagttggctgatagggatgcttatattaaggtgaccaatattagtggtcaaggtcgcgttttaaagcgtaacgcctacatctacagtacatcaaaaaaacgcactacgcataacggtgcttggaagttgtacaaaggctccacagtgacaacttacggtggttcatacaagtttaagaatggcaaacgctattacagaattggcggacctgctaagcaatatgtaagaacatcaaactttaattagaagttgaatatcatttacgacagcaacataatagttgctgtttttttgcctcaaaaaccatagaaaatcttctgtaatcaaggtaaaatgaaattgattttacaaatatcatggaggatgttggaatgagaaaacgatggacagcagctgttattgctgctttagttgccgtaagtactgccgcaactactgttaaggctgacgatactaacacaacagctaatactaatgagacgcaagtaactgcaactagtgaccaaactaattctgattcagataaggttacttataacaaggcagattatttgtctgctaaccctaaattagtgcgaattaagcatgcaactactgcttataaggatgctgcattgactaaatcagcacagagcgtaaaagcaggatcacactttttaattagtcgaattgttaaatctgacaaccaagtaccaatactaaagactagtgatggcttgtatttgcctgctaaaaaatctttggtaactaaggtcatagcctaccaaaatcctaagggttatcatcaagtacattacacacaagttaaaccatacggtaaggtgggttataacttgtaccgtggctatgagggtattaagacttggaaagtaatgcatagagttggtacttgggcaggtacgaattactataaccaagctacttataacgcagtaaagaacttccaacgtagtcaccacttgccagcaactggtaatgttaacttagctacttgggaaaagatgggcttttctaagaagtcatggtatagcattgatagttatgttgccccacttaaggcttatgcttggcaagggcgtaaagctcatattgaagcaatgattaatcaagcttacaaatatatgggaaaaccatggttagcaggttgttcaactagtccaagctacggtgttgattgttctggtttggtaatgcaaggtctttatgcaggtggcattagtccagttccaactagttcaatcggccacgctcatccaggcaatgaatggaattcacgtaatctttgggctgacaagcacctaaagcgtgttccatattcacaaagacaacgtggagacttagtgttctattaccaaccaggtacgcacactatttggcatgttgcgatttacttaggcaataaccgagtaattgaaagctggccaccacgtgtgatggttcaaccaattgttaattcacaaagaaatgtaattgctggtattaagcgaccatttatttaaggaaaaatatgaaaaaatacttagctattttattagtcagcctgggctttagttcattattgttaactcgccaaacagtacatgccgctgataatgatgatgccgcggcaactaatcaatcggctcctaagtatactggccttaaaaaagttggtaaacattatgtctattttgatcaagcaggcaagcaacgttttaaaaataccaagactaaaaaagcatattattggattaataaaagcggcaagatagttggtattaataactacgccaaggtaattagccaactacctgaaatgccaactggttgtgaaattactgccgtgacaatgatgattaattttgctggtaaaaaggtaactaaacagcaggcggccaagattatgccgcgcagctctaaccctaacaagggctttatcggttcgccttacaagaaatatccgctcggctattgggttgctcctaatggggtgaaaccagtagtgaagcattatctcggtaaagcccagaatatgactaattgtggtttgcccgcaattaaggataagctgattaattcacacttggtggttgtttgggtagggatgtttgacggcctctctaaccatgctattaccttgacgggttaccatggtaaaacgatctattataatgatccttggactggaaccaagcggaaaatcaagcaggaaatttttgcaacgcattgggctttagatgttcatcgggcgttgagttattaattttatgtaaatatatttactttttagtcatgttgatcaagccactttcgcagcatttcaacatattcatctgttttttctacaaaagacatgtgaccgcagttttcaaatagctgccatttactgccagcaagctgatcctgcatcgttttagctacataaggtgtacataaatcatcagtcccactcgtaattagagttgggatttttattttgcctagtttttctgtgtattcgtaatcgtgcaagttgccctctggcgtatattcatttggtccccaggcggtttcataagctacaataccaccacatttttttcgcataacgcattcaggccacgttttcgtcatgtcaattgcatgttgattcatgaagtgctcattagcttttaagtaatcaggatcgttaaaattgctagtcaattcggcgcgatgaattgccgcctgttcttcaattggcaagtatttaatcatccggtgtaattctttgctccataaggaagcagacgacaaggttgaagacaagatcaagctttgaatgccaacaggatgataatcacacatgtagattagtgctagcatcccgccccaactttgtcctaataaatgtattttgcgcaaagccaagtgctcccgcaacgccatgagttccttaacccatgtttctttagtataaagttcagggtgatcatcagggatgctactcttgccgcagcctaactggtcgtacatgataatccgtcggttatcaatttcggctaatttgtccaaaacctcaaaataattatgacttgagccgggaccaccatgtagcaatacgagtggtgtcttttcgcttcttcgaccaacaatacgatagtaagtttcatagcccatgaaaggcatttttccttcgataacttccattttttacctatttgaacaaaaacaatgagatattaaccaaaattagcagggtaaagaagattacccaatctctagctgttaaaggaatagcgatgatcgtcgaccttctttgcccttcgacatagccatgtgattccattccttgggccagattgtcagctgaatttaaagcaacaagaattgctttaaaatagaggaccggcgaccaaaaactgagataaatgccccgcatcatagcgctagttcggatctgtttaaccgccatcttcatctgcggaataatgttaatcgccgccagcacgccgtaggcaaatttactgggtaagtgcaggttctgctctaatgatcgggcaaagtctgtagcggtgttattacgtgtcacgcaggcaatcgtcaaggtataaacatagatacgcgttgacaaattccaagcataataagcatttggtgttggtgaaaaccaaaagagcgttgcaaagattgtaaaagcagcaataaagggcaagataatgagcaagattaactctttgattttgattcgagtaataattaaataaactagcgcgaaggtgattactaacaaattagtaactaagctagcttttaaagatatttccagggaaataataaatgctaaaagaaattttaaactaggattcataagcttatctttctacatattttaagcgctgatccgcaaaaatcaggtggtaatcgcaaaattcagctagctcgtctatctgatggctaatgataaaaaacgtctggtggagcttttgctggctttctcgcattaattctaaaacgagtttgaccgagttatggtcaagtccactgagcggttcatcaattaataaaacctgatgcttagtcattagcattaatagaatctgtaatttcttctgttggccacctgagagagaataaacaacttggtctaagtgtttggctaaacccaatttatctagccattcattgaccttttcttcagtaaaaaataaatttctatcctttttacttaattctagttcatctttgacagtcacagctaaaaattggtcgcttgctttttgaaaaatttgagctacttgtgttaaatattttctagctgagatttgagcgatttccttatttaaataagcaaaattaccagtatacggaatcattttggtcattactttaaataaagacgtcttgccaacaccattagcaccagtaattagggtagtgccagaatgcaaatttagctcattttgcttaagcaaaagcttgttttgtctaatttggacttgttttaaagtgaaaataggctcactattaggtaagacaaaatgataatgtcgctcatgcaattttttattttgttcaaataaggctatttttttgctagcatttaattcaataacttcttgattatttgtaaactcaaaaagatggtcgcagacaggttcataatcgtctaaaacgtggtcacttaaaataatagtttttccgttgtgagctaaaatcgctaattttttaatcaaaaaagcacgtgtcttaggatcacaactggcaaacggttcatctaagagcaataaatctacatccatagctattaagacagctaaagcaactcgttgttgctgaccgcctgatagagtattaatcttttgatcgagaaggtctgcaatttgggtgaaagctgttgcctgatctagtcgtgtttgatactcaccttcatctaactgtaaattttctaaagcaaagacaatttcttcacgtggagttggcattgtaaactgttcagccgcattttggaacatcattgccgccttttgtccgtgcaggtccaccatacctgttagtcgccctgcatatttgggatacaaaccagcgataattttgagtaaggtagatttaccgcagccggtcggtccaattaacagagaaaaaccatggggaatttcaatatttagatgattgataataggttctttttcataagaaaaagtaagattgttaacggttactttcataagcttgattgtacaagatgctttggggactgtctacaggtaaagtttgttataagtagaacaaatcataaataatacttaatactaaataaagttttgatttataatgtaattatagtgttaccatattttatttaatttaagtcatgtggtaataagtcaaatgaaaggcgatgatatttgttctttttgatcataaatttgagtatatgaaactaagccttggtaaaggttgatttttttaatgttaaacttttgtttacttttaaatttagaccaatttttgaaattaagacctcggtgtcctgtacagtttgtcatctttgagcaatttaaagataactcgtactaattttcttgcagttaatgtgcaagcacgtttatgcggcgagtagacagcttcatcatacttcttttggtaatattttttgaaaacaggatcatgtaatcttgctagattggcagcttcaatcaagtaatatcttagatatctgtttccagtcctggccattggagtatgttcgttgctgtgatctcccgattgatattgattccaggttaggccggcatacttagccagctgttcttctttatcaaagcgatcgatacttccgatctcagcgataataccagctgtataggttttgccaataccgggaattgattccagaattttgctttctggtaatgcatcaacgatacgatcaattgctttttctagatctttaatagatccattaaagctttgaatcatgttgtaatgaacagaaagcactgcatcaattgaatcagtcattactttgcctaagcgatatgaacctctaacagctttcttaattgctttagccaaggtatctggatcggaaaagcgtcctctgcctttaacctgtaagtaagaaattaagtcttcggtaggcatatccgcgatctcatccagagttttactatcggttacaatagacatcattgtagcaccgaaaagaggagtattaatcttatctttatcgacagtgattagtttattaacccgataatataaagcttcaatgaagtgctgtttggtacgagtcagttcttgaactaattcatatctggtacgcgttaaacgctctaaagcaagatagttgtcttgtctggcaatgcttactcgataatgtccaaagcttagatacaaagcaatgtaataagcatcgagaggatcagttttactttcttcaaagactttatgaaacctgctggtttctttggggttaattacatcagtctctacattgagcttttgtaaatcttcgtcattttggaaaaagtaagcaggatgaaaactgtaaatagatgtagcttccatgccaataatgatttgatcatagtgtttattttgagctagatctaaaatttgttttttcagttcactagcaccataaagatcattgacaaagctatcgttaattaagcgtttgttttgatcttctgaatcaagtgcaacgacctgtaaatctttagaactaacatcaataccgacaaataatttcattggaaatggcctcctttctttcaaatttctgatcaaaaagcaaatactaatttgattaattatcacaatatgactaattacaatttatataatacgaggaaggtggacatatggcagctgttgctttggaccaatatctggcaagtgtattaaagtcaaattcaacagataagaatgaaataaagttggaagctggtaatccagattttgatctgtttactatctaccttgaaaatcataatactggtattcatcgctatcggatggatgtttcaacgattttatatattgctaagggtactgtgacaattaagagtggtgaaaagatcattcaaatgaagtctgggaatgttttgctactgactgaaggttgcaagtatgagattttaagtcaaaaacctgatacggtactgataaagttgaagtttaagcgtggatttctatatcgcaagtattttaaagattttagctgtaagggagaacgtgaggttaaagttattgagcaaatcgttgatagcttagaaaatgaacatgttctttggctaaaaaataatcaaattactcgtgcgtctcaagtgatgcaacatattattggcggttatttgaataatgatttgtttactaaagctttaattcaggctgagttaaccactatgttgattatttcaattagaactcagcgcatggcaacaccgactagtttggataaaactaagtttgaaaagaagaccttagataattacatcgatcttcattttgccgatgtctctttatctgacgctgcaaaatactttggcttcaatcctaattatttctctaatatggttaaggctaagactggtaagagttttgtagatcacgtggatgatcgaagaatgcaagaagcacgtgaattgctggctcagcctgatatttcacttagagagattattggtcgagtaggatattcgagtaagtctttcttttataagaaatttaaccaatactaccacataacaccagcagcgatgcgggcagaattgtttagacaagcaaatatcaatttaaagtaaaaaaataatctggacgaaagttccagattattttttacatattttctaagcgtttaatgcggtctgctgttggtgggtgagtatcaaacaagtgcgtcaaaccgtgattgtggaatggattttcaatatataatccagcactactactatcagctactttcattggttggctattttcaatcttgtgtaaggcagaaattaagccttgcggattacgtgttaatttaactgaagatgcatcagctagatactcacggttacgtgataaagccatttgggccaaggatgcagaaagtggacctaagatcaaaacgaagaccaaggcaaccactttaaaaatcatggctaaagcattactgtcacggtcatcgtcgtcatcactgcgcacgccgccccagaaccaaaaattggacgccatattagagataaaagaaatgaccccaactaataccacggcaattgttgaaagtaaaatatcgtagtttttcacgtgtgataattcatgccctaagacgccttcgagttcttcacgatcaagtaattctaaaattccttgagtaactgccaccgcactatgttcagggtcccgaccagttgcaaaagcattgggactaggatcaggaataatatagacccgtggcattggaacctgtgccaccatcgccatatcttctacgatatgccacagttccggattgtcggcttcatgaatttcttgcgcgtgattcaagctcataatcatgttggctggattttgccacatgatgaataagtagactaaactaccgatcaaagcaatagtaacgcccattgttggactattgctccaaagataaccgattcccgcaccaactaagcctaagatcaccaaaaagatgaacataattaacgccgttttgcgtttattacgagcaatttgttggtaaagcatggttaaacttccttaaaattaaaacttaacttgaggcacattcttttcttcactaggagtttctaagtagttaatcttagtaaagtggtgccacttggcaacaatatttgatgggaaagtaagcaacttttgatcatatgttgctacagttgaattataaagttgacgagagtaagcgatcttgttttcagtgttagtcaattcttcttgcaattttaagaagttttgattagctttcaagtctgggtaggcttcagccaaagcaaaaattgacttcagagaatcagtaatttggttagaaagcttcatcgcttcttcatggttaacttgaggcacattaaccaattgattacgtaatttgactacttcctcaaaagttgatttttcatgcttggcatagcctttggtggtttcaaccaagttgggaattaagtcattccggcgcttaagttgaacgtcaatttgactccaagcttcttcagcatagactttcgctctttgtaaaccgttgtaagttacgatgtagatagccacgattaaaacaataatagctaaaatgatccaaattaaaggtgacatagtttttcctccataaaatatttatttaattttatcgttttcgaatttcttgagcaataaaaaagaatgtcaaagcggcattcttaacaaaaaatattaaattctgaagattaatagtaataatccgactgcagttaaaataatcaaaccagcaaactgcataatggtccattgaatgaaaaatttcttcttgcttacgctgccgtgttgattgaaagtcttaagaactaacatgttggccattgagccaatggctgaaccaaaaccaccaatgtttgaacccaagaataatgcttgagcataagtagtaaatttaccaactaaaatggttgatggtacgttactcattacctgactggagataattgaagcgaagtaagttgaaatttcggaataaacagtaccatggattagatttacgataacagggatttgttggatatcgctgatgaagatgaagaaaccagtaaaggtaagaagtaaggcgtagtcaattttaagcataatccgaggattaattgcgagggctaatgcgattgatgccaacattggccaaataatatcaatggttctgaaaacaccaaagaagaagaaaataaagacagcagtagttatcagcgtcgggcgccagctgatcttgattggctcagctttttgcaccggaatttcttctttaggaataaacagaaagactaatcccatgattagcattgaaactactagataaggtacagaccattcgaaaaattttaatgggctgacatcaaagcggctgactaagaaaatattgtgggggttgccccaaggcgtaaatgctgccccaatatttgctcccattccaatcaaggtaacaggcaaaatttgtggcaatttataacgcttagcaatatttaaatacagtgggatcaaggtcaatgcagtaatgtcattacctaaaaacatccccgaaatgacagccaacaacgaaaacagcgtgttcaacttacgcgtattatcggcaatacttgtaagcttgtacgctaaaacatccagaacatgcaagtatgcatagatctggataatcgttaacatcgcggcaacagaccataatgtatggaaattaatgtccgcaaaccgcggtttagcaaaaaaagactgactactgtaatgatcacagtaatctgtaaaattctatctttagcaatattctttaagacggtcataaaaggtcccccttacgtattacaatcgtctaaaaaccctatgtaccattttgagcctttttgttattgcatgcaatgataaatttaaaaaaatatcaagattagcggtatttttgagcatatttttagttagttggaactagtcgtgctatacttaaataagtaagttaataaaatttagattgaaacgaggaaacaaaatgacagagaatgcaatttcaatcaatattaaaccagatgctgcagaaatgattaaaagcaagatggatgcagatcaccaaattgttatcttggctttagatgatggttcaaccaagtattctaaaaaaggcggcacttgtactattggcgacagcttccagtttgtaatccttgctgaaaaagatcctaagtataatattttaatcgaaaataatgctggtcttgacttgtatactgctcagccggaaacaactttctttgaaccaggtctagtggtaaatgcacgcaactcaactttgagtttatcttcagacagcggcattattgatggtgggatgaccgttacccaatatgaacctgaagcaattactgctgatgatctaaaaaacggcggtcaatgttaaaaaaaataaaattaatcatagggacgagggaatgacctcgtccttttttagtatagaattaagaaagtgatttcaatgtaaggggggaagaacaatgacttttgtcaaagaaataaaagcaggtagtcgtgaattttgccaaaattggctgcggtatctgctactttttatgggattaagtttatttaatcaatttattgttattccactttttcgctatattacaacctttgttttgcaggctagtgctattccgttcgtatcttatcaaaatgtagtgacgatcattacgacgcatacggttgcctttttaattttgataattgagttgctgcttttattagtaatcttgtatgcgcaattagcttatttacttcatggcgtttgggatattaagcatcaagtttttacgtggaaaaatagttttattcaaacttggcaaaatatcaaaaaaattcgtttgggcacgctttttattttgatgctctattttttattggtagtaccgttagccgatgtcatctttagaacaccacttttaagcaaagtgcagatttcagaatttatcttggattatctgacgagaacgccaatcttgttagccgttttgattgcgttttatttagccgctttgatccttggtgcaaggctagtatttgctttacccatcatcgtttttgaccacttaaagtcagtgcaagcagtaaaaagaagttggcgattaacggcgcactaccgttggcggacgatttgctggaggattattgttttagccgttttatctgcagcagtcatgacaattttctatttagcaatgtattgcctgcagctattagttgatttattacctgggaaatgtccgttaattttagccattatcaatctttcgcttgttcaaattattagtgaagtagcgttagtctatgttagtgtactgggcttatctattatttggaaagctttaaggcaagaaaagataagtcaaacaggtaaaactaaaaagataattctaagtacattagttgtgtttgtactagtaatgattaatgcaatatccaccaattatttatatttgactagtgtaaatgctaaagcgccagtaattatttctcatcgcggcgttgatgataaaaatggcgtacaaaacacgttacagtcattaagaaaaacggctaaagaaaagccaaactacgttgaaattgatgttcatgaaactaaggataaaaaatttatcgtaattcatgatgagaatttattgaagctaacgggagttaataaagccccgaatgatttaactttacggcaattagaaaagttaactgccaaagaagacggctatcatgctaagttagttagctttgatcaatatcttgaggaagccaaaagactgcatcaaaaattgctaattgaaattaaaacgacggctaaagattcgaagaaaatgctgcagcgctttaatcaaaaatatggcaaaacgattcttaaaaatgcgtatcaagtacaatcactcgactatcgcgtggttgaaggactgcacttaattaatccacgtttggttgtcttttacattcaaccttataattttacttatccgcaaagtgttgctagtggatattcaatggaatattctaccttgaattcagactttatttggcaagcccatttgcaggatcgtcctgtttatgcctggacagttaatgacgaaaaattaatgaagaagatgatgtatcaacaagttgatggcttaattactgatcgagttgatttagctaaaaaggcaattaaaagtttccaaaaagatgctagttatgctacgcgaatcttaaattatattgttgtcctgcatctgtcgaaaaattttgaatctgcatgaagacttgatctgaagggctggacatggtaaactatactagattttcgaaaatctgaaaggaagtatagcatatgcgtaaaggtgaaaattacaacactggttgtgaaccaaaccaaagacctaagaacaagagaaacgcaaagaagcgtgttgctcacgtagcagcagttgttgctttcttgaacaaggccgcaaaagatgaaaacaagtagtctttaataatattgaaataaaagctaggagctgacgcctctagctttttttgtgcttactgaaaaaattaattctaagtgtataattttttacggtaagttgaataaataattaaaaaagcccaagtcctttgaatttggacttgagctcaaacaaaaagaccagtagtctgatgttaagaacaaaaaacacattagaagctggtcttttatgaattcaattgtaactgaaatcgcaaatattataaagtctgaagataattatattaagcgtgaaagaaaaataatctgtttcttcttaaacctgattaaggaaatcatggccttggctttagctaaagttgatgatgaaatgattaccaaggttaaagcacagcaagttcttagttaaaatcacgccacttaagcgttacccaaaagttacgttagttgtaccagctcataatgaagaattagttattagtaaaactacgcaggcaattttaaatttgaattatccggctgataagttacaaattttaatctatgctgatgatactgctaaaattgcccgggaaataatcaagcaatatcctgaacggaaaatcaatgttcaagtaattgaacgaacaggtagtggtggcaaagctggtgtattaaatgatgctttgaagattgcccaaggagaataccttggtgtatatgatgcagatgccatgccagaagaaaatgctttgtattttttaattaaaaagattttggaaaatccggtgagatataaggctgcttttggtcgcaataagacgagaaatgcgcggcagaattttttaactaagtgtatcaatcaggaaattgttgttacccagcgaattcaacactgcggtatctggcaattatttaagattggtcgtattccagggactaactttattattaatactgattatgtcagatcaattggcggctggcgcaatggcgctttgaccgaagatactgatatttcttttaaaattatgggctcaggtagtttgattgccttagcctataattctgaagccttccagcaagaaccagaacgcttaaaagattattatttccagcacttgcgttgggctaaaggtaactatgaagtggtgatcaataatttttgccatctttttgataaaagcaactggcgggttaaattagagactgtctattattcctgcacttttttctggtttaatttggcgattgttttatcagatctgatctttttttctaatttgattgccttaatcgtccatctttggaatcctgcagtagtaataccatttacaatttcgcggagtaatattttattagctcaaattctgctctttaattggctattgatggttttgctttatattttgcaaattaacctagcgatgactacgcaatatgggcaggcaactgacgaacagatttggctagccttagcatcatattttacttattcgcaattgttcatcattgtatcaattcatgcggttacttcagtaatgctagatcgcgtttttcatcgtgatagtactaaatgggttaagactaagagatttgcggattaggtgatgagatgaaaaaaagatggatgctactaggatttttactcgtaacgattgcatttaccggtattatgatctatatcagagcagataataattcagcggtgcgtaatttttttctacattcttggcataaaaattatgtagttgaagaaaagaatcttgcctatattaataccacgcctaagcaggaacaagtgacggttttatctgaaggccaaggatatgggatgtttattgcggcgcatgatccagcagttaaagaaagcaactttgctaagctagtgcagtattatttaaaacaccgggatcgtaatacgcaattgatggcttggcggcaaacaaagaaaaatggaaaatggagcagtgaacgcaatagcgctactgatggggacttatttattgctaaagctttgtttttagcggctaaaagatggaaaaacccagcatatcagcggcaagggcaaaaattaattgccgatattttgcgttatgaatataatccgacaacgcacgctttaacggtgggcaattgggccgattctaagccgaagtattataatttaatgcggacttcagatgtattgccgacaatgtttgatcaattttatcgtgaaagcaatgattcgcggtggctcttaattaaaaaaacaatgctcaagcggctcaatcagttgagtcaccagcataagagtggcctagttccagactttgcctggctgacatcaaaagatgctaagccagttaaaggaagggttaccactgatcgatatgatggtgattattatgccaatgcttgccgggtgccaatggatttagcatttagtaaggataaattagcaaagaatactgtacatcgcttgcttaaattttttagcaagcaaaatacaattacagcaggctatactttaaaaggcaagccggtcaataattatcaatcagctagctttagcgcgccaatttatattgcggtgaatgaaaatcgcaatcaaggctatgataatttgtttgcttcgcagcaatatatttttgctaaaaaattacctaaaaataattactatgatgcagcactaacgacgatggcaacgatactgacaccggcgcatagattttaagaggcaaaggcctctttttatttgcattgaaaatcaatctttgataacatagtaaaaattttaaggaaaatgaggaggacaaaaaatgggattaaatgcatacattcaaggttttaacagtttagagtcaattgatcgagcaccgggctacttcaagtatcatcaccactcagtagctgaccactgcttcagaacagcggaattagcacaaatgatgggagatattgaagaagtaaagggcaaaaagaagatcaactggaaggctttatatgaaaagagcttgaatcacgattatactgaacgtttcatcggtgatattaagacacctgttaaatacgctactcctcaacttagaaagatgattggtgacgttgaagaaacaatgaccactaagttcattaaggatgagattccagaagaattttaagaaatttatactaaacgtctctcagaaggcaaagatgatactttagagggtaaaattttatcaatctgtgataaattagatttgttatatgaagcttatggagaaatcgaattaggtaatcctaacccggtttatatgcaaatgttcaaggaaagtcttgaaacgatcaagaagttcgacgatttagtttgcgtacaatactttattaagaaaattttgccagatctttttaaaggtgatttcgcgggaaaggataagatgcaacgaatagcttttagcattctattgttaggggatgattaggtgaaatttcaatgtagttcatgcgggctgcgcatggactctttgcattttaagcaagaggggttaatgaatcctaagttgaccagtatttgcgacatttgtatcacgcgcaacctgaatccggaagattacgcaaatgatgcggtcgcaacttttgctcaaagcttgctttacacgtttgtcggtgcaaagaaacaagatcaatcaggttttattgtgaaaaataaaaaggaccgtaaaaaatacgaggcctttttacaagattatgatggcaatgaaatcgcccgccaacagattaaaaggtctgatttgaatttggcggtaattaaaagcgaagatggcaagcttaattatgtgcctaaccaaggcgtaacttttgagcaaaatttaaagggaatgggtttggagatcaatttccagttaaacgaagttgattttattgatcgtgaacgcgttcgggccaagtataaataccgctgccaatattgcggcagacgtggccacagcgtagatcataaggatcccgtttctcttagtcacaacaacagcttagataatttaactttagcttgtgcggaatgcaaccgaattaagtcggatatgccttataagttgtttattcaactgaatgatcaaatttctgagatcaataaaaagctagttaagtatgaagatgcgctgggtactttgagagaagaatttgagcatcgtcggcgctatttagcggctcaagtacaccttaagggtgtgatcaatgatcctgagctaaatgcgattagaaagcaaaataagagcttacaggatgccattgatagtttacaaagtgattatgatgatttgcgtcaaacgcgcaagacgtattttgatacgggctggaaattagctcgcattaaggaaaataaggatattatttaaaacgtaaaaaagcgctattttttgtaaatagaagataaaaataattctgagtttgcaaaaaatagcgttttttttgtaaactcaattcaaaatagaaaatgagttttaaaaagatcatccccatataggcaatgtcattaagttaagacattgacaaattatcgacttggacttttaagatcattcatttgtgatttatcgcatttgaatgatcttttttcatgccaaataaacccaaattttgtttagaaattaggctacacgatataaataatatacagctgatttgggtttgagatttcttttgtcttttcgtcctggtctgatcggaattgtgtaatgactaatttgaataagaatctttttaaagatttcagttgaagaagaaattatatacatagcctggatgacaaaacatgactgtttgaaattgatcgcatattgatacttgcagtttttttgtggtacatatgcttgagcatcaatttgactgactgcgttaaacataatcatgtgggcatagatctccatttcaataaatctatcctgcttggaatgaaactgtacgctacctaaagcatatttcaactttttgaatgaagtttcaatgccccagcgcaaatggtagatctctttgatcctttttaagggataatcggctctatttagattagttagaacaacttcccattcttctttgcctgatttaggatcattaattctaaatttacaggcacgaaattttattgtacataactctccaaagtcccagctgccatctttggtatttttagaccgatattttatatattgacggtaatgatggttaaccaaatgaacgttttctgtagccttatgggtttcataataataattagaggtagtcacccagcaagctatatccttatcacactcttgattaggcaactcagctacttccttaaatgcgccatatcccgttttagtacgtatgacataataacagttaggcaggcgattacaattttcaatcatgttaaagccggtataacctcgatccatagtaactatatatggtccgcaatttagctttttaagcatttgaacggcggctttacgttcatccatctttgacttaggctgaaagatgcagtcttgataagtattatttaacaggtcatagagtgcattaacatgaatttggcaatatggctttcctttatgattgagatttccaacgatattctctgatttaggattccagatttgattaaaatcagacccatcaatggcaaatatacgatatttatgatcaaataactggatattaaataaattctgattaaatacagttagaatatgcttaaaacatgcgggtgaaagctgacctttgcgttggacataagcggaagtactgactactttatcgttatttttaatagctttttggccaaaagctctaaacaactcactggtcaaatcttttccttgcatattaatagtagttttaatgactgtagctgcatctaaaaaccgcttcctagtgaaggcatgaggatcatcgataaaatcatgaatatgctttccagtatcattgataatttgatcaagacgatctaaaatatttctgtgaagggctttcataattaacaccagctttctggcaataattttgaaggtttaataatttaatcagagggcgaaaaggtaggttcttttcgcctttattttatgcaaaaaaagaaccaaatcataatgattcggttctacagagattagattcaatttgtcaatgtcttaacttaatgacattgcccatataggaatgatctttttaatttttatctatctaattcgatcttctggatcaaataaatatttgtcccatttaacttcattttgaacagtagggtggaagagcaagaatgctagcaacagttgaccaacgtaaggaattacgcccagccaccaccaaccaccgttaaagcctgcgtcgtgcagacgacgaacagtgtgacctaattgtgctaaaaaggcccaaatagctgctgcaataaagaaaataataaaaatgatgaagattacaccgattaccttggcatcgccagaatcaaatttagtaacgctgaaaggagctaaaagcatgaaagcaagtaggtaacaagcaagtacgccgattgtcatgataacttggctaattgcagtacctacccagaatgaggttctagtagatctaccatcccacttaaagcagtcaaagaagtgttccttcaagatttgaccaatagttggtacaggaacattactttttgcgccacccttaggataatcttgatcgctgaacaagtatttgccccacttaacttggcgttgaacagatggctgcaattcaagataaaataaaaacattgcgccataaccagtgaaggcagcccagtaccaatagccgctgtagccaacatcgtgcaaacgtcggatcgtttgtcctaatgcagctaaaaatagccacagataaacaacagccgcaacaataccatcgactattctaatgccggggttgatgttttggttaaaagcatagaagccaagaaggatgcataagatgccgataacaagattaatcaaagtgctccaccagaaagatttacgcgtagttcttgctttccagttgaagggatgcaaataagcctcgttcaaaatttgcgcaaaactttctgcaggcggcagtggcagactttcgtcataaggcttgataaaataatatactctatcattcattttacttcctccaaaaattaatttgttataaattatacgctaaaaaagccgtgaagcaattaaacttcgcggcttttttgatattagaattcattatttctaaagttgctcaagaacttttgcgtcttttcattcttaggatggtcgaataattcttccggtgaaccttgttcagtaatgataccgtcactgatgaacaatacacggtctgaaatgctcttggcaaagcccatttcgtgggtaacgatcaccatcgtcaaaccggttgtagcaagcttttgcataacgtctaatacttcgccaaccatttctgggtcaagggcactagttggttcgtcgaacaataaaacttctggattcattgaaattgcacgggcaatagctacacgctgttgttgaccaccagataattgttgtggtttagccttgataaatggatccataccaaccttttctaggtttttcatggcaatcttgcgtgcttcgtcttttgaacgcttcaagactaattcttgaccgaccatacagttttctaagacgtttttgttttcaaataagtcaaattgctggaaaaccataccgacctttgatctaaaggtgttacggttgtagccgggatgcaagatatttttaccgtgaaaatcgatctcgccgccagttggttcttcaagcaggttgatacaacgcaaagtagttgatttaccaccaccagaaggaccaatgatcgttacgatttcgcctttattgatgtcaaaggaaatatcctttaatacttggtgatttccataagacttttgcatgtgctttaagcttaaaattacttcgtttgattcagtcattaattatttgcctccgcatcttttggagtaccaacttggacttggttagccatcaagttgtaattcttattaccttcaagtctcttttcgataaagttgaagattctagtaatagtaaaggttaagatcaagtaaattgctgaaatcattaagtaagttgggaagaacttgaatgattgactggcaatagtagtaccaacgaagaacaattcagaaactgagatgatactcaatactgaagtatccttgatgttaacgataaattcgttggtgattgatggtaaacagtttctaatagcttgaggcaagatgatatgccacattctttggttgtgggtcataccaagtgcactagctgcttcgaattgaccttctggagttgaaataataccaccacggataacctcagctaagtaagcaccagtgttaattgaaacaataatcaaagcagctacagttctatttaaattcaagtgccagaattgggcaataccatagtagattacggctgcttgaaccatcattggtgtaccacggaagatttctacataaacagataataaccacttaactacgttcaaagtccaacgcttgccgcgagtagttggagtaggaatggtacgaataattcctacaagcaagccgataaagaaaccaacaatggtaccaactaaagctaaaagcaaggtcatgccaatacctgacataatcatgccaccatattgcttccaagtagtaactagccagttttctttcttagtttcgttaccagccttaggttgttccttgatggcttgtgacattaattgatcacgctttttattagaaatagttcttaaagtagcgttaacttcatttaaaagcttggtattaccctttttaaccccgatactagttacggaatcgtcatggtcaactttgaagccagccattttgtttaagttaactgcaataatgttagggttaacgttgtggtaactttcaaattcaatatcttcagcaacataaccatcaatggtgccagaagctaaactttgacgcatggctgagaagtcacgcatagctggttcacgcttagcaccctttaattgcttgattaaatcatagtgcaaagttccttgttgtgcagttaacttagcacccttgaaatcagtcaatttcttagcgttagaatacttgcttgccttgttagtaattacgacaaaagtactcttacggtaaggttctgagaagttgattgccttgcgtctttcagcagtaggagacataccagcaataatcaagtcgattttgcctgatgtcaaagctggtaaaaggccatcccattgggttttttcgacgattacttttttgtgcagtcgtttaccgatgatcttggcaatttgaacatcataaccattagcataggagttagaaccatcaattggaacagcgccattagctttggttggctgagtccagttgtatggaggatagtttgcctccatacctatttttaacgtgccagaatctttcttagcagcttgagtctgattgctactaagagaaaaaccgataaataaactgagtaggacagacattattacagccatccatctaaatcttgacttcaattataaaacctccaaaaatagttttaacataaagccaacacaataaagagtaaacaaaaacctcgctcttccaaagaattgcgagggtcataatcatcagtgtttaaaccaaatcttatagcgctccctggggactaaccaggacagtctatagaatattcttctatagcccaacagattaacacgcgaatattaaatctatttcggcggcaaccctaagttaactatcattgttttcgcgaactcaaacttaacttgtgattgtcgcaacctctattgcattggaaaaatatttaactaatgaagaatactagaagaaaaagttaaatttgtcaagcccaaccattattagtttcataatttctctttttcatatcagaaacataaggatttcctgctacataaaaacgtaatttcttgttagcccaaacgggatcagattgattgataccaacacgcgctgcagcaattatttcctggggaatttttttatgacgatcatcaagatcaatggcaaaaggggagtctgataaaaagtgcaaattccaattcttatcatgaataccaaaagcttgcatcatttttgcgggaccattagtcaaaagaacgccatctttaccatgacggttcttgatcatggtctcaattcctaaagtgggatcgattgcacggattaaaacaccctgtggttcattctgaaccctagtggcaacatcaaagaaaaaatattgacgttgcgcgtagatatagatcgttccgcctttgccgtaaagtccttcattcgctgggctacgacgaccgccataagaatgtgcagcgcgatcctttttacccatatatgcttctgcctccacgatatagccgcctaatttttcttgaccattatcaaaagtaagcattcgcccaattaggtcttttgcaatataatcggtagtgttagtagaaaaataagttgaataattcatttttgacctttctagaaaagagataaaaaataatgacagaaattaaattagttcgaatttatgaccatgagcaacctgctggttatcggattttagttgaccgtttatggccacggggaatgagcaaagttaaggccgatttagctgaatgggataaacaaattggccctagtaaggaattgcgtcagtggtttaatcatgaagataaaaaattccctgagtttaagcaaaagtatattgaagaacttaatcataatgattatacagcggaatttttgcaagatgtaaagaagcatttggctaaagaagatgttcttttcttatttggtgccaaaaataaagagcacaaccaagcagttgtactcaaagaatatgtattaaatacgctaaacagttaaatatgtttgtgaccgtgttttttaactttccaaaagtggaagagaattgtcaaaattaagatcgcaaagacaataattgcaaaaacggtgtttggcaactcaaatctcaatggtggcagagctagtagcaattttaaagcgatgattcctatcaataagtaagccattggctgcaattctggaataatatccattaatttaatgataatttcggcaactcctctcatacagagaataccgatcatgccaccgattaaaacaacaacggggttatcagacacggctaaagcagctaaaacagaatcaattgaaaagacgatatccattgattcaattgaaataaccgtacgccagaaaagagatagcacatgtctctttttctgtttgcctttgtggtgagctgcttcgcgctcttctttttctttctcatgttcggcagcttgtttagggtggcgttgatcatagaagaatttaaaggctaggtaaaaaagataaatactaccagctaatttaatctcccaaaagttgatcagataagtcccgattccgataacaataaagcggaataaataagcaccccacaagccataaaccaaggacttgcgttgttcagctttattaggtagcacctgtgtctgtgcggccaaaacgacagcattgtcgactgataacaagcattccatcaagattaaagtcagaatgatcatccagtctttgccactggttaggacatgtaaccagttattgccgtcaaaaaagggtgcatatagtttaagaattgacatgtagttgcttcttttctaatttaattaatctgattttttctttttgtcccagacgataagtcccaactttattgttggataaaataactctttggtcaggaataaaaatcaaaacagggtttaatgctacggcgtgtgcaactgagcgagaagatgtggcttcggctagtgaattggcgacgtcaccataagttaacgtcacaccataaggaatatgctggacaacggctaatacctttcgttgaaattcagtgccgaattccgaaatatcaataggaacatcaaaattctttctgataccagcaaaatattcctttaattgtttgatatgaggtgccatctttttagggtcccgcaccaacatgcggtgagggtagaagctaaaaataggtgaaacagtttcatctcctttaagtccgacgtaagttaggccggcttctgaagctgttaaaaagtaggtccatggctcaattgtaacgtaatcatagtaaaaaaactctgtcatgtgtaacatctttattaaaaataattagtctaagaataacaaactaggaaagttaattcaaattctggaatgctgttaatgcatccccaattatttgcgtgacaccaggggtaggaatttctgtcttgttgatagagtaaattttggcgtcttctttgcgataagccaagagctgggcaaaaggataaactacaaaactcgtcccacaaatgatgatcaagtctgatttttgcattatttcaacggactggtttaatactttcggatcaatgccttcgccgtataacacaataccggggcgaataattccgccacaatctttgtgtaaatagcttttagcatattcttcataagaaacaggttgatgacatttagtacaataaatattatataaattgccatgaaattctgttacatgttgattgccagccttagtatccaaagtatcgatattttgggtaattaaattacctttttcattacaaaaatgggcgattttttcatggattaagtttggtttagcagtaggaaagtacatattgttcatgacaaattcatggaaaaattcaggtcgattgaatagcgtactatcgctcagtatagtttcgggactttcttgcacgccatcatagattccgtttttagagcggtagtcagggatacctgagtgggtagaaacaccagctccagttaagaatacaatatgttgggcattattaatatctgtttgtaattctgctaaatccatcatataatgtcaccctccgtgaaagtcactactttaattataaatcattgttttgttataatgactgaaaattgaaagcaccaaaatcaagctcaagtcctgtcactattgagctttcttagacgtaattagtttttatatgatctgtttcagtgcaatttgtatgaatcgtggcagttggttaataaagtcattgattacttcatctatcttttcaaaactattctgtttaagctcttttaattctgaaattaagtagaccaatgcatctacgaatctaatatcaggtaaggattcgttcattagatagaataaatctccgattgtcttatcatctgtattttgtctttcctgccaggtcaatagatcataagttattgctgtaactgcgatatagccacattggccatcatagctttgaacttgagatttatctaaagcaagatattgcttagacgtcttaaaatatgtttcaatttgccatctacgaccataaagttggatgatttcttcagggctaagctttgtctgagtagtagctaaaaccaaatacttgttcttgtttccacggttggagacaaagacgagctttaataaaaagctatgtccatgatattgagcctcaactatgcttgaataaagataatgtttctttttacggatgtttgaagcagccaaacgatcatacaagtctttaacgctatagcggcgatggcgataaatgtaataaatctttgaactcttcttgatcatgccaagtccatctaaaccgatcttctttaaaatccaaaacattcttggagaagaaaaccaagaatcgaataagacgtatttagcttctactcctaatcgtaaggcttgtctaatcaactctacagttacatcattcatctttctctgagcttgatttctccttttaccagaaattgaacgttcatcagcagtaatgggagcagctccaatcatatttttcttggttttggttgacatcaaggcaaagttaaccggcaagaaggtattgccatcgctccagcctaaagttaaaccacgatatccgttccaatactcatgcttgtcatggtcatagactttagctagcaattcggtctttttagaaaaagaccgagccatcagcgtatcgtcaacgataaaagcaagtcggcgtcttttatcgataaatggttttaagcagccaatgagccgggctgcaatcaagcataatagtttttgccagttgattcttccatcgttaagtacattgcgagcagttctaacggaaaaacgtttgtcatccttagctctgaataaagaaagccgagcaaaatgtactgacatcagccaagagataatcatggttaatgaaacggtggatttacgcttaaaattgacttgtttagttaacttagctagaccaattagattaataaatgaagaaattaaggatttagtatcattttctgtgtcgatttgttctatactgttcattgcgcaggatctcctttactttttaggtcgacacttaaagtataacgcagagagagcctgcgtttttatttttgataagaaaaagccaagaggcgcggggaaggagcgttaatcttagctttcaagtttcagtataatgattaaaataactaaattgaggggatttttatgaaatatatgacgtatttttatgtagcaattgatattttattagtagtttatgcttgttatagttggtattggcaagctaaagttgattttcgtggtcgctatcgtatctcctcagttgtttgggcgctaatttttatctggctgggctttacatggaattacattgaaaaaggtgatccaggcctgagcgtcttcttggctctttttatcttaattagtattgtcgatggtttttcaggatttagtaaaaagcggatggtcgtttcaggctacttcaagcgtacagttaagtatgatgatttagccagcgctactttaatccagatccccaaccaagagaagccattagtgatggcgatttttcgaactagcgatggtaaggcttatatgatgcgctttaataatgaagttaatagcgtaattaagcaattacaagaatatgctggtcgagaaattcctgtcgaagttcaatcaatgatgtaattacaaaattggagaaagcattcgcgagaatgcctgcaaagtccgcaatgcgcgactttgcttttttatttcttccttagttagtaaatgcgagtgtttcatatcttcttcaaaagctgccaccattttctggttgaactttttatcataaaaaacggcattatcttcaaagtttaagttgtaagaacggaaatcttgattcattgaaccaactgaagaaaaatggtcgtcgacaatcgtcgttttggcatgtaaaaagccatcttcgtagatataaattttgacacccaagcgagttaattcgttggcataccactgtgtggcgcgataaataaaggggtggtctggcttacatgggatcataattcgtacgtcaacacccgatgaggcaattgtttgccacgtagcaaaaacggcatcatcagggattaagtatggtgtttgaatccataaccgtttgcgtgccaaaagcattagccgcatcataccgttacgcatatatggtgcataacgatcaggcccatctgaaatgatttgcgttgcaacgtcgccttcgtggatgtttttttcatcaagatcaggaaatagagtggaattgaaacggatgagctgttgattattagtgatagaggcgttccagtccatgacgaaacgctcttgcaaaagcagagaggcagaaccaacaattcttacctgactatcacgccaatgaccaaacttcttttttttgcctaaatattgatcaccaatattaaaaccgccagtccaagaaattcgcccgtcgatgacaacaatcttgcggtgcaagtggtagttaatgcggtaacgggtgatcatgttgcgtgaagtgataaaaggcaaaacttccccgccagctgcccgcaattgatcgaaccatgctttagtagctcccattgaaccccaggcatcataaattacgcgtactttaactccttgttttgcttttttaatcaatagttgcaaaacacgattgccgatattgtcgctataaaaagtgtagaactcaacattgattgtttccttagctcgtaccatgtccttaagcatgtcatgaaagaaggtttcaccttcggtatagagcttgacctgattatttttagttaggggagcttcttgttggtggttaaaaaagttaattgctatattaccagcctttgaagtgtcagaaggactagtatttttaggtgctttagcaatcgatttttgaacatttctcaagccaatgtgtttttgcttattgatggcaaaaatattttcctgggaaataccccgaccaaagaaggcataaagagtgatcccgactactggtaatactaacaggatgattaaccaagcccaagtggttgaaacggatcttctacggtggaagacaacgtagaaggctaagattgtgttggtaatgataatgattctaacaaagtcatgccaccagatcataaactcctccaaaattaaactacttttttaatttaagaaacttgtcaataatatcgattacaaacggattgtcatgcatccaactatgttcggcgtcatctttaccgcgtacttctacttcttgataaaaatgtgcttttggggcaacgatatagcgaatgctttttgcggaaacaacagagatgaatttatcagtatttgtgttatctaaaacgttgccataaatattcaagactgagatatcaggattgaatttgcgccgattaaaaaacaaataaaggtagtgcgggttcatgacactaggccgaccactttcggtcaaatagttgacgtttgggatatcgcccaagtaagtgaccccgtcaaaaggaccagcgataaaggcacatttttttaaatgtgggaacgttttgctgcggtagtgcttcatttccgtgcgaataatacatggacaagctaatgaatgagcgactgcaatatagtttttaaaaccatatcttttagctaaaaagggcaggacgaagttgagataatagtcgatgccatagataccgactattcgctggcgaaaagcaacctgcacgataggatgcttgtcactagtccaagttccttctaatttgaaatttcctaataaatcaacggttacctttaaaaacttgggattgcccttgtcatgagtagcgtgtttcaccatcacgcgagtggtataatcaccgccgcgaaagccatggaaataaataatgggtacttgttttagatcgcttttttcaatgtttgccttattttcaatatggcgcttgtgtaatttgaggaaaattcgcgtgggagcgaaggtggccatcagccccaaagaaatcatgttaaacatgctaggttcttcttggaggtcatgtttatgatctttttcaacttcttcggcatatttttttgtgttgaaaaacatttttaccaccttctctttcttttttcctataataaaagttatgcaataagtatattttaccattgggtaaagattttggaattttagaggtagaaatgaagttttatgcagtcaaaaaaggacgtactccgggaatatatcggacttgggatgcagccaaagaacaagttgatggcttccctggtgcagaatataagtcatttgaacaaattaccgatgctacagattacttagattggaatgcccaaactcagagcgatgtcctgcaaaaaggtgaagataatttacaaaacgccgtaaaaagggtgcaacaaaagagtcaagaaataaaaaaagcaccgcgaaaaaaggcgaagcagtataaccatgttaatagcaatcctgctgacttctttgcggtgacttatactgatggtggcacgcgcaatactggtgtttataagggcggtcacgttaaaaagaccgataaagcagcctgggcttatttaattgaatgggatgaccagaaagttcatggctccggtggtgaatatggtgctactaacaataagatggagcagacagcattgattaatgcactaaaaaagctgcttgagcttggttttaacgataaacatctattatttgttcttgattcgcagtatgtgttgaatgcgattaataagcattggctacaaggctggaaaaaacgtggttggagacgttcttctggaccattggctaatgtggcggaatggcaggaattagatcggttattaaaggaatttcctgatagtacgtttgaatggacgaaaggtcacgctaataatcgcggtaatgaatttgtcgatcatgaattgaaccgttatatggatcaaaaaatgtaagaaaaaaaggctacactgtagccttttttaatttaaaataacgccgccgaacaaaccactaaagaacttaacgatttgatcccacaaattttgtaaccagttgcggttttcttgggtattaaatttattgaagatatttttagctccattttgaatctgactggataatttcgaagcctgttgcttgaagttaccgtccttcaatgcccctgaatcacgaatttcaattagaagattgacaatttgatttttttgattgttgttgatggtgtcacctaagtggttaatattaatttgattgttgacaatgtcgagaatttgactgtcggtaatgttttgcccttgtttagccatctcattcttggcaccggcaaccgcattgttcaattgagcatctgaataaccttttttgtttttattatcttgggtaatcccagacaaggtattcatttcatcttgagcggcattaacttgcttttgatttaatgcattgccatttttagcataggcagcataaactccagctaatgcccctgaaccatcaattggaatagcgctagtaacataaatgttggcatcgctgatgccggcggtcagggctgcgtttttgtactggttggcagtaatagtcgtgatattatttttaccatcgtagtctaaaattttaacgttgattccgctgcctgagctggtcttttggatcatcgcactggaccaaacaccggatgaagtggtgaaattatcaccagagggatttaaatatttaaccagatctgagccggtaacagtaattgtttgataattaccaccgtttagtggtgcagttaaggtctttaatgtaccttgtttttgtgaatcagttaatgatgtacctaaggtaactacaggtgtatcatcatctgctaatactggcttagtaaatgagatcatcgcgaccacgcttaataacattgctgtgagtagtgtgataaatttcttcattttttcttcttttcttcctttttgatcgaatatttattcttgtaatacggaacattatactaaatatttttcaaaagtgaattaaacaacacgtaaaactttcttaatttcgaccttattattgaagatggtataataaagagcaacaaagggggacaatatgttacaagtgcctaagttaaccatcatcatgcctgtttataacacggcgcaatacttgccacgtgcttttgatgctctgcttaatcaagttgacaagagcttcaaattgcttgtagtagatgatggctcaacagataattcggttaaggtagccgaaagctatgccaatcgttttccatattttaaaataattaaaaagaaaaatggcggcccatccgatgcacgtaatgttgggatgcagtatcttgacacaccatatgtcacctttcatgatggtgatgattgggtggatccaggctacacatccttttttattcatgcttttgaaagtcatccagatgtcagcttagtatcatgtggctattggatggattatcctgacaaaaagcaacgcgttgttggtcgaccagaaggtggctatttaacgcgcggtgaaacttatttgaagttgactaatgtctttagctcaccaatgaaaggatatagctggaacaaggcctataaaactgccattattaagaaatatcatttgaagtttgatagggatatttcactactggaagatcagatttttaacgttaaatatatttctgtggctaaaggcgtctactacacgcaaaaaccttattaccactactggcagagaaagggcagtattattcaccagcctaatattaaaaaagttgcggataatttccggggaaattaccgggtttggagcaaaattatcagtacaatgatgaaagaccgcgaggaagaaaagatgcgtaagaagttagagcgacagcaggccttgcgtgatagtgaataggggaaaacatgaaagaaaaagttaatggagtcgaaatttattatcataagttaggtaaaggtgagcctttgcttttactacatggacatcacttagatggtggtatgtttgataaaattgtggctccgctttccctttattacactgtctatgtgcttgatatgcgaggccatggtttaagtgaaggcgacatcgctgaacactacaagaccgaagtagaagacgtttatacctttattaaacaggttggcattgaaggctgctattgctttggttttgatgcaggtggtctggtggcaatgatgctagctagaaaacatccaacgatctttaagaagatgattgtagctggcgttttcgttaatggtgcaggcattagaccatatcactacttaacggaaggctttcatcgctttttgagacttgatcgtgacagccgcgtagagttgactgagtcctttatttcagtagatgacttgaagaagattactacgccaactctttgtgtagtaggtgaaaaagactgggttaaggttgagcatgtacgttggtatagccaatttatgcccaatgcgcggttggtgattatgccacggcagacgcatgacagttatgcagtgcgcagtttaaaactgctggatttgattaaaggattttgtaggtaatacgcgtggtgctagttaaatcgttctaggcaatatgccatattataagctaaaatggctatttctagccgctgctgaaagccagctaagctccttgctcggttattttcagcgttatagtaactgagcaaagaaaagtcgctttcaattgttcttctaattgccatcagttgatgattattatgttttttagcacctttcatgttttttcgatatggtgtccaaaggacatagcccataccttttaactcggcagctaagtcttttcctaagtagccttcatcgcctaaaagataatggttaattggatgagcattaatcatcaattctgtcgtttctttggcatcatgcactgatgctttagtgactgcgtagtcaagcaaatagccatcatcgcttactagcgcgtgcaccttgaaaccataataatagactttcttggttgctttatagccaatatcggctatgtcacggaagatcttaacacgataattacgaacaggctgacaaactggaacaggaaaactgtcaataattaaaaattctccagcaacctttacctcttgattccaagcttgacggatgcagcgaattaaaggcaaaagcatcttggctcgacgattaaagcgagaatgagataagccaacaaaaaatttacagaatcttctttgggattcaattccaatttcagtttgccaaatgagcatcgctaagatggagctgtcggaaagctttgtttgatcaatgttttttcgatgcgtaagcttatcaggcgcataaagattatatagtgaacgacaaattacatttaaacgactaaaactaacttgtaaatggtgagagaaacgattaagcttgaggtagttcaattagatcagactcttttctatttaatttacttacaacttgagtctaatccgattggacttttttattaactaaaacgatttaactagcaccacgcgtaggtaatgtggatagtattgctggttaacgtgatagttgctgcagttgctgttatatttggttttcaaaatagggtagaaacattaaatctgttcaatgccggtatagtttttatcacttttgggattgttttacttttaggtgcaattcctgtttatcaagatttcagcacgtcatcaattttaatgttcattgcaggcattttaattattgttagaattattatgctagctgttagtttaattaccaaagtgccaagaacagtaaatctacaggatattgcaatttcattgatgatcgctgcagtttgtttgatatatttcatgcacggtttaaatctgagcttaagtaatttagtcgtgccagaattagcattgattattggcattattttgttttattttaaaagaaagcgtcaataaaattgattgcaaacatggacatctcttcaatagaggtgcctttttgtatataatggtggtgtatacgatttttattcagaagaggtaaataatgaacaaggaagaacttcatcaattattgcacccaatgaaagttattggcttaggtggtaaccctgcattaaatgaaaaaattgcggcaattttacaccaaccattgatcgaaactgcggttcaccactttagcgatggtgaaatccaagttaacattggtgaatctgtcagaggttgtgatgttttcgtaattcaatctatccaagatccagttaacgaaaactttatggaacttgaaattgttttggacgcacttcaacgtgcatcagctcatgtaattaacgtggttgtaccatacttggcatattcacgttcagataccaagactcgttcacgtgaaccaattaccgctaagttagtggctaacttgcttcaattgactggcatggatcgtttaattactgttgatctacatgcctcacaaattcaaggtttctacaatatccctgttgatcacttacatgctattccacttcttggtcaatacttcttagataacggaattgctaccaaggaagatgatgatatcgttgtagtctcacctgatcactcaggcgctaagcttgctcgtaactttggtcaatacttcaatgcaccgattgcaattgttgatcaaagaggtgctcgctatgatactgaggttcacgacatgattggtgatgttaaggacaaaaagtgtatcatcattgatgatttgattgatacaggttcacgtatttcttcatcaactaagtcagttttggcagctggtgctaagaaagtttacgttgccgcaacccacgcacttctttctaagaatgctactgaagtacttaatgaattaccaattgagcaaatcgtagttactgataccattaagcacaagcgctacccagacagaatggtcagaatttccgtagaccaattgcttgctcgtggtatcgattatgtatacaatgatcgttcaatccaccaaatctttgacgaacaaaaccgtttaaagtaaaattcttattgataatttgaataaaaaatgatcctcactatgaggattattttttattcaaaaaatcgggtagataagtcataaaactatgtctaaatagtaatgattgatataattgatgtgtgttgtatagaaagagaaagagaaagttagaggaatagactatggcacgacggaaaaacatgaagagacggagagttattctaggtaatactttccatctgatcagagaaaatggaatggataatgtttctttgcaaatgattgcagaaaaatcaggcatttcaaaatccttactgcagtcatactatcctcataaggctaagttaactaacgacattatccgcaatctttttaatactttaggtcaacaagttaataattatgacatggctaatagcaatcttccttatgctagaactaaggcatttatttatacgattgctatcttggggatgcacgatgagggcttggaccgtattatttctgaagcttttgttagcaatgctaccctagataattggggaatcatgcttaatgaatggattaaggaaaatcatttatttgatgacattaacgttgacgaaagcgaacttgagacaggaattgcgtttgtaactagtggtattggccgtctatatcatgatcgcaaaaagcaccatttaacggccgaagctcttgctaactatgcaacgagtgcattgatgttcagtttcttgcattgttcttctgaagaaattgatcaagccttaaaagaaggacatgaaattattgaaactgctgatatggaagttgttcaccgagcaattgatacaatgttcgatgaaggcaaggaaattttcagctaaaggggagtcgccatggttgaaggcaaaagagctgatttgcgacgaatgggttatgagcaaaataaccaatataaacgtttgttggctttcgtcatctttttgattgctgcattgtcattgattacagctacttttttaaatccaatctttatgaaaaaacagattaggactagctataatagggcagtagttgttcgccaagtgaataaaaattatgatagcctagctgatttgattaatgcagatagtgaagataattcaaacttactatcggatacgcaaactcaaccaattgccgaccatattattgattattctttgggcattcattggtttaaggttactagtttgccactggctaatcagattttaagcgatatcgatcaaggaattgctaaaggctcatcaagtggggcacaggaagttaaccgtaaactgaaaaagcagggaactaatgcaccttacgcgattattaaagccttcaatttaagtgtgatcactttaggagcaaatattgctggtttattgtttatcgttaatttgataataattattgttaccattattacaatggtttcgctactcaacgatatgaagtcgcgggctacaattcgaatggtgattcatgatacgatggctgctggcatgtgggcaggtttttggctaattttgatttcaggcttgttagcacttgtgccagtaatctttaatgtcgataatatcgaatttggctttttgcttgagattggcagtagcgtctttttggaatatgtaattgctggggtaattatttacatcatttgtgcgataccatggcaaattatagctgctaaataagaatgagaaaacgtaatctgtagaatgattacgttttttgtttgcacaaagaatcatctttctttataattaaaaaataattaacaaatttcatatgtttatattttaaaagaattgggcgagtttatgaaaaaagctaaaattataaagacttttcttgctttcattactatgctttcgactctttttttgtttaatcagcctgttaatgcagccaataaggaggttgagactggctcagtgatgaaaaaaattaagcagtcgaaagaattagtagtgggcacctcagcggattatccgccactggagtttactaccagtgaaaatggcaataccaaatatgtgggagttgatatcgagttggcaaaagatattgccaaggatttacatgcaaagctagttattaaaaacatgagctttgattcacttttggtagcgctagagacaggcaaggtagacatggttatttcggctatgacacctaatcccgagagaaagaagagcgttgatttttctaagatttattacaagccaagtggcgaatatttcttaattaacaaacgcgatcaggccaaatacaaaaaaattaaagattttgctggtaaaactgtcggtgcgcaaactggtagtattcagtattctttgattcaaaagcaaatgaaacagtctaaggttaaaggcttaggcaaaatcaacaacttagttctggcattaaaatctaataagatctctggcattgtcatggaagaaatgactgctaaggcctaccaacaaaacgacaatagcttgatggctgtgagaagtgacttgcgtgaacaacaagctggtaacgcagtagcaattgctaaaggacaaaatgacttagtagctgctgtgaacaagactattaatcgcgttgaacaaaaagatttgattacgcgtggtgctagttaaatcgttctagacaataagccaaattataagctaaaattgcaatttccaaccggctttgaaagcctatcagactacgtgctcgattgttctcggcattgtaataggtcagaagcgaaaagtcgctttcaattgttctgcgaatagccatcaattgatgatcattgtgctttttagctcctgtcatatttttacgatatggtgtccaaagttcgtaacccatttgttttagctgttgatgcagttctttgcctaaatagccttcgtcgccaagaagatagtaattagatggatgggtattttctatcagttcaactgtctccctggcatcatgaactgatgcctttgttacgacataatcaagaatgtaaccgtcatcgctaacaatggcatgaactttgaaaccatagaagtaaattttcttggtggccttataaccaatgttggcataaccgcgaaaaattttagcacgatagtttcgaattggttggcaaacaggtaccggaaagctgtcaatgatcaagaactgtccattcaggtcaacctttttattcatttcttgccgtatctgataaatcaattgcaatagctgacgtgaacgccgattaaaacgtgagtgtgataaacaattgaaacattcacagaatcttctttgtgattcaattcctgtcttagcttgccagataagtaaagccaaaatcagactgtccgtagttttaatttgatcaatatttcgccgatgagtaaactcagccggtgcatacaaacgataccagtgccgacaaattatcactaaatctttaaaactaacttgtaaatggtggctaaaacgcttaagcttaaggcagttcaatcagatcagactcttttctattattactatttacaagtcgagtctaacaagattggacttttttattaactaaaacgatttaactagcaccacgcgtatttgattaataagaaatacttgcctgaagcagctaagtatatgaagacagcgcagaagacgaacacgatgactaaatatattccttactttattaagggagttggctataccatcgtgatcacgattttctcagtgttaatcgggatcatcttagggatgctcttagccttaatgcgtttgtccaagaataaattgctgcactggattgcagtttgctatatcgaattcattcgtggtacgccacaaatggtgcaaattttatttgtttactttggtgttggagcattaatttctaacctgtcagctgttgtagcggggattatcgcaattgggttgaactctggtgcttacgttgcagaagacattcgttctggtattgcttcagtagctaaaggacagactgaggcggctagatcattaggtctttctcaagctaaggcttaccgctatgtaattattcctcaagctttgaaaaatatttggccggcactaggaaacgaatttattaccctgctgaaggacagttcattggtttcagttattggggtaactgaattaatgtaccaaacggaattgattcagacttcgacttaccgtggtgttttacctttattcattgccatgattatttactttatcatgacatttactttaactagattgcttaattatttcgaaagacggatgaaacacaatgactaaaatgatcgatatccaacatttgaagaaaactttcggcaaaaatgaggttctgaaagatatttctgcggaagtagataagggccaggttatctgtattatcgggccatctgggtcaggtagagtactttcttgcgttgcctgaatgtattagagcgtcctacgactggtaaaattgtttttgatggaacagacttggctagtctaaaggatggtaaggaacttgatcaattgcgggaaaagatgggaatggtttttcagaactttaacctttttcctaatatgaatgtaattgaaaatattaagttggcaccgatgaaagtcaagggtgttagtgaagctcaagctgagaagactggactagccttacttgaaaaggtgggcttggccgatcgtgcaaaacaatttccagctagtttatcaggtggtcaacagcagcgggtggcgatcgctagagccctagcaatggatccggaagtaatgctatttgatgagcctacaagtgctcttgatcctgaaatggttggcgaagttttgaaaacaatgcaagatttagctaattcgggaatgacaatggtgattgtaactcacgaaatgggatttgctagagaagtagccgatgaggtctggtttatggctgatggctatttacaagaaaaaggcacgccacaggaagtgtttgaacaccctactagtgaacgtgcaaaagatttcttatctaaagttttataatcaaaaaggctcaagcattgcttgggccttttaatttactcatctgtaatgatggggtttgataatacgtactgtcttacgaaaaaattttgatgccatcctttttgaattaatgcattaaaaaaggtgttttgattattaggcaaagcagtggctttgggaatgatgacagcacgtaaaatcttgttttgaagtaaaattggtgattgcacatctgtttcgctatttaaattagtggttgcttgattggtcggcgtgttggttgtatcctgctgaacttgataatttgtagtgtcattagtactatcttgcttaaatagcttgaatctgtacttctgcacgcctttaacgtcaacttcatattcatgtcctgcaactaggttagtatttgcgggtgaataagttaggatcgttctaaaattgccgtagccacaggagctgtaattcttaacatgagctgcagtagtaacaactttagtatctaaatcagtgatagtaattgttggcttatttttaatggttctatctgataaatagagcgaccacatgatatttttcccttgaagcaattcaatagggaaaagacgcatgctaggataagcaactaccggctgactagcaggacgaaaagtatcattaatgtttagtactttttgaacggaatagcggtagccatttgtaccataagctgccccaatgcctgtagtggttaaacgacttgaaagtagccaagctcggtgaccggtatctgaaccagttaaattataatggtcagtaattaagtcagtgatcacatccccagcggtttgctgtgaaacattaaagtttaaatttgaagtttcagaagtgtctttagctagcttccaaacaaatttggagatattgcttggcttagtttcactaggtaaaccatgttggttaatgaatgggttagcattaattgcggccattacagcagccgtaatctgcgcgtttttattaagtgtatcagtagtcgagatagcgggcagactgaacaatgatcgatagtaattgatataatctgtttgcgttttaatgtattttggatctaagcgacctaccttaaattttttgcttagatttggctttttagcataaatatttgcggcactataactagttttatcaaggttcgcatattccttttgaaaattatgaacttcgttaacttcttgtgttgtgaatgtcgctgcttgtgtaacttgtccggcgagggggataaataaagttgcggcagcggcaatagaaaatttccgtagaagcattttagactcccttctatggttgtcagtatacctttcattataaactataaccaatgaaaaggctttagtgaaaaatattccactattttgcgcttttctggtattctttgcgtataattaaagattggaacatttaaaagaggtataaaataatgactaaaaaattacaagttggtttgatttttggtggtaattcatcagaatatgaagtatcaattgtttcaggccgcaacatctataaggcaatcgacaaagataagtttgatgtgcacccaatttggatcactaatgaaggctactttgctaatgaagaagaaagcttcaaggttttagatgatccttcataccaagttaagaacccacataaagttaacaacatttctaacttaattgaattagaaaacttgccagaaattgatgttttcttcccaattgttcacggtaacttaggcgaagacggtgttttacaaggtttgttccgcttgatggataagccattcgtcggtgatgacgtcttaggagccgctgtaacaatggataaggaattcactaagatcttggctcaaagagttggtgttccagtcgctgattggatttcaattaagcgttttgaatacgacgacaagaagaatgctaaacttaactatgaaaaggtagcagaaaaattgggccgcgacatgttcgttaagccatctaaccaaggctcatcagttggggttagtcacgtaactaatgctgacgaatatactgcagccttaaaagaagccttcaagtatgacgataaggtcttagttgaagaaactgttcctggcaccgaggttgaaacagctgtcttaggtaacgacaagccaattgtagcaggtgttggtcaaatcaccaatgcaaaaggttcattctacacttatgaaaataagtatgatgataattcaacttctaagttacaaatcccagcagatttaccacaagaaattatcgatactgttagagaaaatgcacgtaaagtttatgcagcaactgaatgtagcggcatggctagaattgactccatgctcaccccaggtggcaaggtagtcttgactgaagttaacgctttaccaggctttactaatatcagtatgtatcctaagttgtttgaagaagcaggtgttccttacagcgaattgattacacgcttaatcgaagcaggtatggaccgttttgatcataagaaaactttgcttcacaagcatgactaaacgccaaaaatatagaggtagatttcaatgacgactaacaagcatgattttgaagaattggctgcaccaaaagcagctgcacaagaattaggaattagtgttgccacgttaagaaagtattctttaatcgtggagaaggtgaccggcaagatcgactattttgctcggactaagcaaaaggctcgtctgtatcatcaaaaagatattgatgacttaaaggcttttcaccgtttatctaaaaatagtggcttaactttgcaagaagccgctcgtcaaatctatgctgttagtgaaaagaaacctgaacctgaaactaaagaaccagctcctaagcccgcttataacagtaccgatgtaatggatactgagcaggtggttaagttgcttaacactttgcaaaagacaatttctaatcaaaatgaggcaattaattctttgcagaagcaattgaatgtcattcaaaagcaaaatcaagatttaattgaagcacaaaagcaattagctgcgccacaagatgatttagataagtttgcggctttgccagatatttctggaattgtgagtgcggatgaacctaaaccgaagagtgaagaagaaaagcgcgctgaagttaaaaaagacatgaataagagtcaagaacaaatgcatgacgagattatgtctaaggcaaaggaaaatgccaagaagcgggctacttcaaatgttcaccgtacactagaagatatgcaattaacggaccaaaaggaacactggtggcaaaaaatctttaagttttaaacaaattgattaagaatcaagagctgacctaacaaaaggccagcttttgttttacagtaggcgtataacaattaataggaagtagaagtaatgaaatttaaatggaaaaagcgctatacgatagcagttatcgtggcaattgtgggagcattattgacggttttgtcctattttgccactgatatttaccacaaggacgacgttgccgtgattaccgatagcaagatcaaggatactttgattgaaaaaagtgaagatgtgtataaaaatgcggatgaaactcgccagcaaattttgcacttaaaagttttatcgggtaagcacaagggcgaaacttacacgactaaaaacgtgtattatccttcgcaattgacgacgcaaaagtatcgtgcaggtcagagaatttttgtcaatatcaagaagggtgatccagcgatcgttaatcctaagcgtgattgggtgttagttttggtagtgacaatcactttagcattgatggtggctgcagtagggaagcactcactctcgctggttgtgtcaatggtaatttcgtggctgatcttttatttgattatcatttgggatgtgcatttgaatggcgcccacattattttgctgtttggcttagctgatatcgtcttttcattctttagcttgctcattgtgcagggcttgaataaaaaaatgttggcgacttggttggcaacgctgctaggagtatttgtttcttttgccttgtgctacgtgatcatgaagttaacgggtgaatcggaaatgaaatatgagaccggtgactatgcaacgcaagatccacgaggcttgtttttagctcagactttgattggaattctaggtgcagtaatggatgaggcgaccgatattatttctagtttgtatgaattaattcaaactaaaaagaatattacgatgagacagttgattcatagtggtcgaacgatggggcaagaaattatgggaccgttgattaatgtcttggtcttaatttttattgccggtgcgctgccagaaactattttgtacttgcgtgataataatactttagcttcaacttttggctttactctgtcgctgggggcaacgcaaagtgtgatttcggcaatcggaattgttctgacggttatttttgcgacaggatgcagtttgttcttcttgaaaaaacgcgattggaagagtttgtttaaaaaagaaggtgagaataaatgagtacattatttgcattgatcgttgtcttagcgattttaatgacaattgtcggtggtgaaactggaattcgtagtttttttagtgtgctaattaatacgattctattgatcttagtggcgatgctaatatcatggggaattaacattgcaattttgacgctgatttttattcctttaaagctagttacgattatctttttaggcactcatgactatacggtagcaaagaattcattttattcttccttcttagtgtgtttgattattagcctctttattttgggttgtcaatacctggctcaagctgcaggactaggaccagaggcaggagagttattggttggcttgtcgcagatgccgggcttgagttatccgatgattgccgtgacagtggcgattttctcaactttgggtgcaatcgccgaagccgcggtagcaatgagttcgggcttgctagaaatcaagaagcataaccctgctatcggtgaagaagagttgatggcttctggtacggctattggtaatgatgttttgggtacagcaatgaacacgattttatttgggatgttcggtagttttttgtcattattcttatggtatttccgcttgcattacacgattggtgaagttttaaatgaaaaactttttgtaaatgaagcgttaattatcatgtattctttgattggggttatattaacagtgccactatcatcatttatgctatcaagaggaatgagcaagaaaggaccaaaacatgagagtagaaaatctgacgctgactaactttaataatcgtgaatatcaagttcatacatatgtgctagagcctaatcctgaattggttgagcaaaagcgcccgctagctattgtagtaccaggtggcagctttaatcacttatcaaaaagagaaggtgaacccgtagccttagcatttaacaatcaaggcttcaacagtgtggtgatggaatataatttagtacaagatccaggtaaaatttaccctgatgcggggttagatgttctaagtactgtgaaatatttcagagaccacgctgatgagtatcaattggataaagataagattttaacagttggcttttctgctggtggtcatgtggtcagtgtagctaataacatggctttaaataaaaattatcagacaaagtatgattttgataagactgatgttttacctaataagacaatcttaggctatccgctgattgatattaaaaagattggttttccgattccagaagatcaaaaagcaaaaatgcctgtagaggaagatattttggatagtgcattaggtgttacacgtgaaacgcccgatacatttattttccaggcatgggatgatccggtggttttgatcgaaaattcgattgaatatattggtgctttgaataagaataaggtttcagcagaagctcatttgtttaaccacggttaccacggcttttcattggctcgtcacaatgtggaaactaagggtcaagattggcaggataatccgcacgcggcgcactggtttaacttggcaatggaatggctaaagagtgagtggggcgaatgatgtgaagcataaaaaatcttctaaccctaatgacaatatctatcacactatcgtcaagaatagaaaaattgaccgaatgattatgccttttgaagcggtgtactgcgtgtggctaatcattacgctggttcttaactttaagctatttgcatactcgattgacgcacaattcgtgctaatttctctatttttcattagcggatgggtttcgtcattagttaagaatcattgcatgaagaaaagtagaaaataagataagtaaaaagagttctcgcacgagaactcttttttattagaatcatttactttttatctctaaagaaaataacttccttagcagccacaaatgggccagatgacttataaacctttaatctaatagccttggtatcgacatttcttaagccaacaaccttattcttgctatcagacttccaagtcaagtgatcgccgtatggcttaaagttaacgccatcgcttgaaagctcgacactaacttcaacaggatcgccttggtgatcaatctttctaggtacccagaccattcgactcaagtgttccaaatgattaaaggcgaagtttaattcaagtggcttgtcttcgctgaccccatcaatggtttcccattcacttgctaacttcaaatcagtcaagtaatcaattggatgatccttaggactagctagactgctcgtgacatgaatgtcattaattgcgtagttcattggatcgggcttggtaattgcgccaaacggatctgaccattctgaaaccttattaccagctacataacgcaagcgtagggtgtagcgggtatttggcactagttcatggaaagtgaacgaattgccatcaatgccgtcgtgcaagatgccgttaacttcaatttgaacttgatcggttaattgcggccagactaccgtcaacgaatgagagctgatcttgtctggatctaccattggttgttttggtgagcgtaatagtgaatccgtaatggcgtgaaccaaagtttcattgccatatctgaagtttctaattgtaatttcaatcttagaatcggtaatgtcgcgtttagccagcttaatttgtaaagcagtttgtttcttttcttggtattgatcaaactcaggcatccagctgtaatttgtgttaaagaagaagccttccttagcatgggcaaatgtatcaacggtaccgtactcctgcattgggatttccttgtcgttgattttaacagtcaaaccatcaggataaccgtcacacatgatgttcaagttggtggtgttttccgtttggaaagtattgaaatcgccttgagttgggtcgatggtgatcgtcaatttgcttgcttctaaatcactcgtgatttgtgtagctacatggtttcttgaatagtcgttatagccgttatcatcgtaagtaaccattttactcttgccttgagggtagaggacataattgcgttcgccgaggtcaaaaatagcgccgcctcgtacaaatactggtaaatgccaggatgggtaagactgcttattataaacgcgtccgcccaagtactttttgccatcaaataagtcaacccacattgttctgtggttaggcaagtaaaggttgtcttttcttgaattgccattaccatcttcgcgaccgttaacaattggcgaaatcaacaagttaggccctaacataaattcatggcctacctgtggggtgtagttgacttgttcatgtggaaattccaagaacaatggccgcaagattggctcaccgacttgagcgcggtagattagggtatataagtaagtctgcaattgctcacgtagttttaaataggctcgattaatttgcgtcatcttactattgtaagcaaatggggtcttactaaatttaccttgatcgtctaagttgaacaggattggggtaaatgccttccattcaaaatcacgaatggcaatttgagcattaccaccgccagcggtaccgtcaacggcgctgccaactaaaggctgaccagaaaggctagctcccaaaaagccagctacttgcgttggaatgttttcccagttgccgccaatgtcaccaaaggctagcattgttctattttgactaccagcaataccagtattagagaaaatcaacggccgcttacgcttcaaattgttgcgtaaaattagcgcatcatttttcaatacttttggatcggttgtgtccgtttgaataaaggtggtatcaggtgaagccttcggtgtgttgttttgactccaaagaccagcgctaacgtcatgtatagcggcgtattcactgaagctagccatggcttcttcgttgatttcttgcacatcatagttaggcacgatccaacttaatttaaaatgctgcttctggtagcgatcaaccattgcccgtgctgagaattgatattcttcttcgccgttcaaggaacctttgccactagcatcttctggcttgttagttctggtgtaataattaccgtcttcaaacatgacagcattacgttccttagcttcaccaggttgccataaggtagttaaaaagttgccaacatgacctaatcctagtgcatatttaggtggcatcagcggcttacccgttaacatgtaatactttgccaaaatatttttgggtgaattacctaatagataaaaggtatcaaacatgttggtgtcgtgcttcaagatagtggcatccggattgcttttaccaaagtcataattgccagcactctcagtattgcgcaattcaccaaagccggagttagcccagaagaatggcactcgggtcaaaacgccgcctttaccggtaatcttgtcgcgcttgattgaaatgatttcacctttatgactgaagtagccgttctgcatcccgccaccaaagtaaaattcattcttgtgttgcttcaaaatttcggtagtttgatcattgcctaattcaagtggactcagctgaaccaaacgattgcggtgcagcatctcgtcaaagatgctcattacggctggcttttgttggaaaataagttgataattgccagacttaatgattaaggaatcgctggttgccttaggctgtgatttttcaaaatagtcattgttgaattgagacaggtcaacaaaagatgagtgattctcgtcaaacttcttagctggatcgagaaaatatctgaagatcccgtcagctaaaatataaagacgagcaatatcgccggtggagtagtgaagttcataataatgatcacgtttgttggcaccgataagttggcctagttgatgtctttctatttggttttgtgtcatatttattcttcctatttaaacttgctaccttatattataactaaaaatcaaaaaacttcttaagcaattgtactaaaactggtatttaccaattttgttagatataattaaattaacaattacgatttagacatataaagaaagaagatatttatgacttattacattcatgcagataaatttttcttagaaaacagaacagaaaacggcggctatcttgaagttcaagataatggcaagtttggctttttctatccagaaagcaaaaagccaaaaggtaagattgtcgattatgctggcaaatgggttgcaccaggattagttgacacccacattcacggctcattgcgagaagatgtaatgaagagtgactgggaaggcatcaataagatctctaagggcttgcttagtgcgggggttacttcatggatgccaacaacgatcactgccgcaagcgataccttaactagaatctgtaagatgtttgcggaccatcaaggacaagaagaaggggcaaagattcaagggattcactttgaaggaccattcttcacggaagaacatgctggagctgaaaatcctaagtacatgatggatcccgatattaatgaatttaacaagtggctggacgcttctaacgggatgctgaagaagatttcaatggctcctgaaagaaaaggttccaaagaatttattcgtgaagccgttaaggaaggcatagtagttgttttgggccactcaagcgctagttttgaagaagcagtcgcaagcgttgaagcaggtgcaaccatgtttactcatacctttaacgggatgcctgatccaagccaccacacgccatcaatttctaatgcggcaatggcacttaataatgtgaccgatgaattaatctgtgatggccaccatgtgcaaccatgtatggctaagactttgattaatgccgttggtccagaacacattgccttgatcactgattgtatggaagctggcatgatgccagatggcgactacatgttgggtgaattgccagtctatgtaaaagatggcatggctcgtcttaaggacggcgacaatttggctggatctatcttgcaattgaagcaagcagttaagaatgtagttgactggaacatcgttactccagaaaaggcagtgatgatggccagctatgttcctgctaagagtgctcatatcttggacaattgcggtacaatcgcaccggataaggatgccgacttcttgattttgaacccagatttaaccttgagtgagacttacctaaatggtgaattacgttataaggcttaatttgttagtctagttttaaatagtcctcattagattgagggctattttttgaccctaaattttggcaaatagtatacaattaataatagtaaagtaggtattatacatacgaggaggaatttactgtgccagatggaatcagtcaattactagtactttttatgtaataactttcaattaattgaataatttgtactcttattgattaaagaaaagtatcacatatgtttcatgaatctcgtctagccaagtaggtgagattttttattatgtttctatgtaatcgctttcaatttagaaagaaatatgctatattatgagtgtaaagaaattaagaaataaaaaatatttaaataagtttaggtaaaaggagacaggtgagttccgatgggcacttgagagtagaaagtcagatattatagaaaggtttgtgataccaatgggcatcgtaaattgaaaacaaaatgtagttcaataatcatcaagtgatattaatgtacataagaggccgtgaaattattagtaggcatagaataataactatttgatgaatcacttggattaggattaagaaagactttcatacatgataaatattaataagaaatgacctttcgctggaatgaagtatgcgaagggtcatttaattttggcttgaaaacgtttggtatttagcattattgttatttgttaaatataatatgaagtacatgtactaggccgatagagaggaaagttatgacaacagactcaattaattttaaaatcgatgcagaaagtaaaaaggtgatgattaaagaattagcaattattaatggcttaattcctgatgatgataatacagtagataatctaaatgattattttaaaaacttaggaatttaatggtttattggtcttttatctgatgtagtaaatcatgatttagtaagtcgtaatttagtaaaatataatttagaagatggtgatcttatgtttattggacgaaagaaagaacttactaaattagagcaatttaattagcgtggctaaaagatattactacttgttttcaaagtcaggctttacggattcatgtacggaactggcagaacaagtggggtgcaagttgattagttttgatgaaatgtaatatcatttttcctattatttttatctgttgtgatcggagtaagtactggtgtttaaaaaaggcgataatgtggtgttaattctaaagcctaatggcaatcttgaaatgaaaaaagaaaaaactaatttttgggacgaagtatcaaaaatgtctgctaaagaaaaaagattgcagattgaagatttgggatatgatccattagaacaaagatcaaaaggtagagaaagaattgaggattaaaagttagaaaaggttcttggaatcttttttgatgaatttaggtaatctgaaaaaagaaacggcaccgctagataattagcgatgtcgttttagttatgcttagctatattagtatgtctgcttaatttatttaataaactgcgccgtcgtagaagttgtaacgagggcggttgaagtcgaagtcttttaattcactgatcttaattgcgttatcgcaaacaccccagctcattaagttgattggcttaccgtaatcttcatcaggaattaccaacaagatgtacttgccttttgaaagggcatagccaagttccattcccagaccaacatcttcttcttcaggcaagtaaacgccaagcatgatgtcgctggacttaatccctactaagtcgttatggtaggtagctgatgcccattcaatgtcgtgcaagtattcagggtgttcatcaacgcggatacccttatattgattatcaagaggtacgtagctgttttctaagtcaacggtaggattttgctttagagcttccattgcttcttggtaagccttattttgcttttcgttgaaccaaccggcaccaaagtataaagtttttgtctttgccatatttttctccctttaaaaatgatttaccttaactttaccatcttttgggttgaaaaaaacgtcttgttaacttatggtgaaaatgttaattccacattaggaaggaaaaatccaatgactaatcaaaatctttttgcacctgatgcagtatttatttctaatcaaactaagcaagatttggtttttaaagaagtttacgagcatttacgcgaaagtggctatgttaagggaaactttttaaaccatattgtcgaaagagagcataattttccaacgggattggatactgcaacactaggtaaaaatattcctaatattgcgattccgcacaccgagggcgagtttgttaacacgagactgattgttccggttgcgctgaaaacgccagtcacttttcataatatgattaatcctagccaagcaattgaagttaaatttttattcatgcttttagataatgacccagatgggcaagctgcattattagctcaagtaatggattttttggctaatacgccagccaacgaattgcgcgaagtttttaattttactgatcctagcgcgatttatgcctttttacagcaaaaatttggtaagaaaaaagaagactagtttttagcctttttttctaatcttcaagataaatattacgcaacttcatgatgtctgcacttgagagcttcattacatcgcgtaggtagttattaataccgccatattcatcgtttagtactttaacagcatggtcaaggtattcactgcggacactctgaatgtcacgaatcgattgcagcacattttcatttttaccattttgacgggcatgttcaaccatactgtcgacgaaatccttggtagtgatgttggttaaaagatagtctttcttaatcgtatttagtggtacgccaagagcagataatgcaagtaatgcaccgaagccggttctatccttgcctgcagtacagtggaaaataacactttcgccatccaccgtattttcaagcaagacatcgaagaacttgcgatatgccttttgtgcaggttcactttcgatcatgtcttcgtaagcataatgcatgtgattgaagccaaaatcagcgtcgtcgtgtgcttgtgtatctaagtcagtgatactcttggatgaattggttaagtcctcactgaagacgggatcatagatatattcaacaccatctggcacgcgatcgggttgattatcaacttcttctttacttctgaagtccacgtcatatttaacgccgtaatcagttaaaaactgcttatcaaatggtgaaagatcagctaagttaccggttctgagcaacttgtgcatcttgatttttttaccgaataaagtttcataacctccaagttcacggaagttgcgtctactagttactccgattaattgattagttaattttttagtcaaaaaaattctcccctttctgttaatgaatgtcatgaatattattttagcaacaaatcttcaagcaaacaatcaattaaaaagtaacggctttcaaaattatgctaaaataaagggtaagtactagtgcaatttataggagatgaattaacgtgacagataaaacaaaagaaagcattttagttccagttgatggctcagaatcagctgaaagagcctttgacaaggctgtaaaagttggtttgcgtgatggtgctcatgttgatgtattgaacgtaatcgatacgcgtcaatttatgggtgaaatgcaagacactttgatttcaggagataccatttaccaaatgactcaagattctgaagaatacttgaagagtttgaagaaatgggctcacgataacttcggttttgacgatgttgattatcacattcgttatggcagtcctaagcgcattatttcttacgacttcattaaggaccaccacaatactttaattgtgatgggtgctactggtttgaatgcagttgaaagaatgttgatgggttcagttactgaatacgtaaaccaacatgctttagctgatgttttgattgttaaaaccgatatgggaaacaatcctcttaagccaactatgaaaaagaactaatataagaataatcgccaaatgattctaaattcattggcgattatttttttgaaaaaagttgcaaaataccttgatagaacacgaatgtttctggtattattttatcaaatgaacgtgggaacgaaaaaggggagtgaaagataatgtttatgcaatcagaacaatttattgcaaaggatgtgtctttcgctcgtaaagacgttttttctgttcgtttagttattagaaacgtcattaattaggcttaattattgatcgcctttggcgacccgtaattaagtctttttttgtgatgtagagtagtttgttttatcactgtgtatttatgtttatggaggacataatgaaaagatttagaagaatcttggtagcagtagttgcacttcttgtagcagtagttgcaactgcgtgttcaaacaagagtaatagttctaagggtggttataccccaaagtcattaactattcaatttgtaccaagtcaagctgcaactaagttgcaagctcgtgcaaagcctcttgaaaagatgctttcaaagagattgggtatcccagttcacgtttctatgtcaactgactacaacaccgttgtggaagctatgaaatcaaagaaagttgatgtaggttttcttccaccagatggttatgttttagctcacaagcaaggcgcagccgatttgcttttgcaagctgaacgttacggtgttaagcaaccaggtggtaaagcaactaaccaattagtaaagagctatcgtgcagaaatccttgttaagaagggttcaaagatcaagaactggaaagacttaaagggtaagtcaatttcagtacaaaacccaacttcatctgctggatacgtattcccagttgctgaacttaagcaaaagggtttggacgtaactaagagttgtaagttagttactgttactggtcacgaccaagctgttttgaacgtattaaacggcgatactgatgcagccttcgtctttgaagatgcacgtaacatcgttaagaaggacaacccaaagatcatgagtcaagttgttccaatttactttactaagccaattcctaacgacactatctcagtaattccaagtatgtctaagtcattccgtaagaagcttgctaaggcattcatctctgtagctaagtcaaaggaaggtaagaaagttatcgaaagcgtatatagccacgaaggttacgcatacgcaaaagatagtgacttcaacgttatccgtaaatacgacaagatcgttgaatcaactaagaaataataaatttaattaagggagtttgacgattaaatggcagataagccaatgattcaattaaaagatgtttccaagatctacgacaatggtactgtaggtttaaagggcatcaacttaactattaataaaggtgaattcgtagtagttgttggtttgtctggtgctggtaagtcaactttgctacgttcaatcaatcatttgcatgatattacttcaggcgatattttgattgacggcaaatcaattacaagtgctaaaggcaagaatttgcgtaaattacgtcgcgatatcggaatgattttccagaactttaacttggttaagcgttctagtgttttgcgcaatgttttggtaggccgcgtagcttactacccaacttggaagactacttttaacttattcagtaaagaagataaacaaaaggcttatgaagctttacaacaagttgatttggccgataaagtttatgcacgtgctgacgagttatcaggtggtcaacaacaacgtgtagctattgcacgtgtgcttatgcaaaatccaaagatcatcttggctgatgaaccaactgcatcacttgatccacagacttcagtgagagtcatgaatgacttgaagatgcttaatgaaaaatacggcatgaccgtagttgctaacttgcacagtatcgaacttgcacaacaatttggtgaaagagtaatcggtatccgtgctggtcaagtagtttacgatggcaagatgaaagatactcctaagtctgtcttcactaatatttacaatggtggtaacggcagcgaggaggatgaataatgcctgaacaagtaaatcaattgcctaagcgtaagttcaaagtaatgaacttggtttggacaatcatcatgattgcaggactatttatttcaatcaatgttactaacacgcacattagtgtcttgtttgaaaactggaaccaatttgctgacatctttattcaaatgtctcatccagattggagctacttgaacgttgtttggcctaagttgattgaaaccatcaagatggctgtcttgggtacggtaattggatctgttgtcgcatttatctactcattattgattgcccgtaacatcgttaagaacaaggctgtgactggcattcttcgtgtgatcatgaacattgtcagaaccattcctgacttgcttcttggtgcgatcttcgtagctatcgtaggtatcggtccagttgctggtatcttggctttagcagtcttcacctttggtgtggttgttaagttgttctacgaagcaatcgaaacaattgatccaggtccaattgaagctttgactgccgtaggtgcaaacaaattgcaaattatccattacgcagttatgccacaaattatcacttacttcatttcatatgttctatatgcatttgaaatcaacgtcagagcatcaacagtccttggttatatcggtgccggtggtattggtttgaacttgcaacaaactttgcaggtcttcaattacgctcaaactggtacgatcatcatcgttattatcgtagttgttgtcttgatcgactacgtttcatctaagtcacgggaggcgttaatgaaataatggatactacaatgaaaaaattacccgctaaacccgttgaccgtaagaaacaagttgcacattggctaattgcaattgccactatcgtaattattgtttggtcatgtactggtattaacttcggtggtattaaagccactgctggtcaaattgccggtgcaatcttctcaggtattttccatcctgactggagctatgtttacaatggctcaggtgaagacttggtctcacaattgtggcaaaccatttgtatcgctttcttaggtacattcatttccgcaattatttcattgccatttgccttctgggcagctcacaccaagcacaagcattggtacacttcaagaatcggtaaaattgttttggcaattatccgttcattccctgaaattgttcttgctttgatgttcatcaaggccgtgggtcctggttctgcagccggtgttttggcattaggtttccactcagttggtatgcttgccaagttgttctcggaagctattgaaaacttggaagaagggccaaacgaagctgttattgcagccggtggttctaagttccacgtaatcatgttttcaactatgcctaacttgatgccagctttgatttctaacaccttgtatcgttttgatgtttccattcgttccgcatctatccttggtttggtaggtgccggtggtatcggttatccattgattattgctttgcaatatcgtcaatgggaccgtgttggtatcattttgctagggatcatcattatggtggtgatcatcgactggatttctggttggatcagaaagaagttagtctaattcccaaaatttgaatattaaagaaagcgaagacgaaaagtcaatgtcattaagttaagacattgacattatatcgacagcttttaaagatcgaatcattttgattcggtcttttttctttttaaaataaaaagtgagcagagtttatttgcctttctgctcactttcgtcatattatctggtctttcatagaaagctgtgcctcttatgaaatcccttcactcaaatattttaaagctgatggatagtattatcaataaaatcgctgacaacattcacgatttctctgtatctgatcaagcttttactcgctgtcgtaagctcaattccactgatttgattaagttaattcttaacatgggagctggcagcctgaattcggaaatttttcatgcttttcctgacataaattctagaatgactgcttcggcttttgaacaacaaaaggctaaattaaagcctgaatgctttaaagaaattatgttagaacttagccgggcaaataatgtactgcaattattagataatcaatacttagttgttgcgattgatggctctgattttgatcaaccttttaatcccgaatcagaaaatatttttcgaggtaaagatggtcgaatatactgtcaacttcatgtaaatgctctttatgatgtcttgaataaattatatttagacatggttatccaacccagacaaaaaatggatgaacgtgaggcagccttaactatgttaaagaaattagcccaacaagaaaaagatttcttagtcctgatggatcgtggctatattagctttaatttaattgaaaattgcaatcgattaaaacattgccactatgttatgcgatcaaaatccggagatggtgcttttaaagaaattgtagctatgtcgaatcatgaatacgatattgacttatcatgcagagtaacttcgtcacattattattatgtcacccataaagatacagaaaagtttcttcacctgattcttcacaaaaagcatcactataaagctgttcgttcaaaaaataccagagatcaacgctgggattttgaggatatgtgtgatgttagatttagagtttgtaagtttagaatcaatccaccaggttcagacgatgagtgggaagtcctcatcaccaatttagatcgaaatgaatatcctctagctagaatgaaagagatctatcatcttcgctggggaatagaaacttcttttagggagcttaaatatgacttaagcggcatacagtttcattctaaaaaagatcaatttgtttatatggaaatatacgcccattttgcaatgtataatgccgtgagtttatcaataattgcgagctcaaaaccgtatactcagggaaaatatcaatatcaaatagattttaaaatggcctgttgtatctggcgacgatattttagtataagtgataattcagataaaaacttcacacaattactgctggatgtggcattttatttaacgcctattcgaccaggaagaaaagataaacgaaatctaaaagttaaattagtagttggctttccttatcgtctagcagcttgaactaatttaaacgactatcttaagatggcttatttgtgctatcaaaaaagacatttatcgaataaaataattcgataaatgtctcaaaaagtgtcatcagattagtcaatgtcttaacttaatgacattggacgaaaagtccccgcttttttgttagccgtgaaatttaaattggcattgattaagatgatcattaattaatccgattccctgcaagtaggaataaatgactacaggtcccacaaaggaaaaaccatcttttttcatttgtttggatatcttctgcgataggtcattagaagcgggaacgtcatcaaagctggcaatatcatgcacaattggagtaggtacaaaattttgtaaatatttggcgactgaacaatatttttgttcaattgccaaaaatgcccgagcatttttaacagcagcattaattttcattcgattacggataatgcccttgttttgcattaatgactcgatatctttatcggtcatctttgcgacttcagagatctgccaatttttgaatgcagctttaaaattgttgcgtttatgcaaaactgtggaccagcttaaacctgattggaaaagttcgagcacaagcatttcatacaaatgtgactcatctagattaagtttgcaccattcatgatcgtgatactcctgtactgcttcgtcttttgtatcgccccatggacagcgaataatttcttgattcatatttttctctctttctatgtaagtaatgttttacccctctattatttattacgcaaaaaaatgcgattattttttgagaaattatatttttatgtgcgaaataagggttttaacagctttttttgctataattaggtgtgaatttcgaggaggatcctatggaaaaattagataccatgatgttggctgatgatttagccttatcacaagataaaattttaaatggcgaacaagactttggcgctgaagctgtttacaaagtaatcgataacttgggcgttttaaataacccaatcaaggattacttcgacatgactgaagaacaatattatgaagctgaaagcgatcacaaactaactttgatcaagatggacagtaagttgactgatttgcatgatcgcattttaactaaccatgttgatggttttgttgataaggacgagatcaacttaacctacaatcatgagaatctatatgaagatgatttatacgatccaactactgattatcgtgaaattgtttacagcttgaaagttattggtgcggttcaagcaattgcagctaaggacttgcaagaagtattgtctaaagatgctgtattatcaattggacttgccgcatatgctttagcacacaacgcataaattatttgagtcggctggtaagcggccggctttttttgcttttttgaggcgaaaagatgaatttgtttaaacacacaaagggaatagttgatcgaatcgttggcgccaaaaaacgctctgcaatggataaagatagtgaattgcttgatccgatgcaaaaatatactactgttggagaatatcatgttggtgccgttgatggtactccacatggtaaggactatgttttaaccgtttatcaagacgaagacggcgtgttgcgacaagcacttagtccagagactacaacgaaattagcaccggaatatttacgcaagtataatgcgaaactaggtcattttcgtgcctttcataataagaagacagggcgccgttattgggtggaaaattacttggataatttcactacggaagtgaaaaagcatattcgcccaggcactaattcggtcaatatcggtgtaattacagatactcactttaaagataaagatagcagcgatttttatggctttaatgggctgcaacatgtgcaagaattttcttatttagatcaatctggcttgctagatttaaaagtccacttaggtgactggatcgatggctccgatgctggcctggtcagtgaaagtgaattggtcaagctgaacaagtcttttaagtcggatcaggtgccatatttgagtatcaagggtaatcatgatgaaaatgataagtttgatgaacatcatgatttaaaagcctcatttccagaaaatgaattcgaaaatattatgtggcccgatatgtaccgacaacgaggaattcattatgtttcgcgccagcacggggtggcatactttgatttagatgacgtgcgggtgatttcagttaatacgtcagatgttccatatgaattaaataaccgcgggcaaaagcgctatgacaataagattgtattggctgtgcgtgaagatcaaattgaggaaattatcgaaattttggctaattcttccaacaaaaagatcatcttcatgtcccatgccaacccgattaatcgaaaggggtctaatgcacttaagtataatggccgctctttgcacgaactgctagttgcttttaatcaacgtgaaaaaggtcgaatgcacgctagcaatggtgttccagcagaatttcgtttatcaaatagttttgattttaccaatatcaagaatgcgagaattattgcctacttctgtggacatcggcatcgtgaagaccagtatcggatcaacgggattcaatatattttgtttaactgttctgccttgatggggccaaatcattccctaacaactaaatacaacaaaaacttagaccgaagaattgatcaaaataatgaatttgcgggttatattgtgaacgtcgatttaaaacgacaccgcattcaatcctttggctatggtgcagcttctagacgccgggtgtatttcatttagttaaggaatagtaaaggtatttggctattacaagtgtttagcttataataaaaaagttaaagtaaaaaaattataagtgtaagtatttttatatatagataaagtagagagaaattagcttaggggaagttgaaatatgtgcggaattgtcgcattttatgatccaaaaataaacgaaaaacaagccgttattggtaagatgatggctactatcaagcaccgtggacctaattccgacggttattacactaatgatgaggttgcccttggtttcagaagattgtcaattatcgatcttcgtgggggagctcaacctatttataatgaagataaaactagagcaattatctttaatggtgaaatttacaactttaaaccattaagagaacaattaattaaagcaggccacactttcactaccaaggccgatactgaagtattgcttcacggttatgaagagtggggcatggatggccttcttaagaaggtacgtggtatgtttgccttccttatttgggatgacaacaacaagaccctttatggtgcacgtgacttctttggtattaagccaatgtactacagcaaccaagatggccacttacttgtaggttcagaacttaagagtttcttggaatatccaaagttcaagcgtgaattgaacgttgaagctgttaagccatacctcatgaaccaatacaacgaccttgaagaaaccttctttaaaggcgtttacagattcccagcaggtcactggttcgaatacaaagatggtgaaatgaagacccaccaatactgggatgcggaatacaaggaaaatagtttaagctttgaagaaactttgaagcgtatcaacgatgacttgaaggaaaccgttgatttgtacagaattgctgacgttaaggttggtgcattcttgtcagaaggtattgactcttcatacttgactactttgcttaacccagacgatgttttctcagtaagttttgatgactcaacttacgatgaagcttcaaaggctaaggcattagctgacatcaaccactggaagttctacagtgacaaggttgatgccgacgaagctatgcgtgattttccagaaatgcaataccacatggatgaaccagatgccaacccatcaatcatcccactttggtacttgtgtaagttagctcgtaagcacgttactgttgcactttctggtgaaggtgccgacgaattatttgctggctacgttaactacgggatgcatacgcataacgacattattaaggtctttacttcagaattgaaaaagttgcctgagaagaagcgggttaaattggcacacaagattaagagaatgcctaatttcccaggtaaagttcacatgtacaccaatttagctgaaccgagtgaattttatgtcggtcaatcggttatctatgacatggattacccaactatctttacttctaaagatgctaatagcattttacagccaacgtatcgcaataaattgactgttaacggcatttaccaaaaagactttaagaaagtaaagggagtcgataatgttaagcagatgcaatacattgacttgcaccactttatgcttaacgatattgaacaaaaagctgataagatttcgatggcccattcacttgaagttcgtgttccttacctcgacaagaagattgcggaattggctaactctatcccaaccaagtacttggttaaccgtcatgataccaagtatgctttgcgtaaggcttcagaaaaagttttaccagatgagtgggctaagagacctaagcttggcttcccaactccaattaagcaatggttgaaggaaccacgtttttacaaacaagttcatgctctttttgaagaagaatttgtcaacgatatttttgaccaaaagaagattatcaagttacttgacgacaactatgaaggtgatggctcacatagacgtcaaatctgggctatctacaccttccttgtttggtacaagttgttctttgttgattacgaaaacacagttaagaaatatcaacacgtgcaacctgaagttgctaagctaatttcacagggcaaattactataattctagggagattttttgaggatgagtaaaaaatttacgccgatcttactcggtagtgatatcaacgtgtatggtatggcacgttcatttaatgaagcatatggcattaaagtgaaggccttagctgacgttcaacttgctgctactcgttattcaagcattgtggacgttgaattgcatcatggctttagtagtgatcctacttttatggacgtgatgcacaaaaagatggaagaatacaagaatcacgaggagccagttatcttgattgcttgtggtgatggctatgctgagttgctttctaagcaccaagatgaattgaaaaaggtctttatcgttccttacataaaatatgacttacttgaaaagttaatctctaaggaaggcttttatgaaattgcggaagaatatggcttgccttatcctaagactaagatcattacgatggatgactacaagtcaggtaagtacgaggatgtcccatttgatttcccagtggaattaaagccggaagatccagtttcatggttgaagtgtcaatttgaaggtcggaagaagacttttgccattcaagataaggctgaatttaaggatatcgtaactaagatttatactcatggctacaacgctgaccttattttgcaagactttattcctggtgatgattctaacatgcggaccttgaatgcttatgttgataagaaccaccaagtaaaaatgatgtgtttagggcacccattattggaagacccaactccacaatcaattggtaattacatggcgattttgcccgagtacaatgaaaaattgtacgaagaagtacaacaattccttgaaaagttgaactacactggtatggccaactttgatatcaaatatgatccacgtgatggtgaattcaagttcttcgaaatcaacttacgtcagggacgttctagcttctacgtaactttgaacggttacaacttggctaaatggtacattgatgattatgttgaagatgccttgaaagataaggaaacagtttatggtaataagcttgaatctaaatacaagctttggttaggcgtgcctaagaagatcttcaataattatgcttatgacaacgactataagacgactgctgacgaacttattcgtgagggccgctatggtactactgtcttttatgacaaggatagaaacttcaagcgctggttattgatgaagtacatgttccataactacttcaaacgttacaagacttactatgaagttaataagggtaagatctttgacgaagaaaataaaaaattaaacaaatagtttaaattgagaggtaaaaaatgcctctctttttttctaaaaaattttagctgaatcatttcccaatttaatggtcttttggttaatacaagatatattcatctatatttgaacataatacaagatgttgcgttttatgctatgataaagacacgatatttggagtgattgaaatgctaaaagaagaatttaaccaacaaaatgtaacaaaatttaatacgcctaaaacttttgttaaacgtgatgggtcaaagtatccgttcgcaatttttaaactcaacatggttttgcataacctagatttagataatgtagcacctgctgtaattgaaaaaattgtggctaaactagatgctgctgatgaagtaaatgcacaagatgtagcagttgcttttagagatagcctaaatgagttgggttatttggatgaagctaaagcttatgtgcaataccgcaagcacgatgaagaggaatggattaaacaaaccgatactcgtgcacggttaaagcgaatggttaatggtgacccaacgattgttaacgagaatgccaacaaagatagtgaggtcttcagtactcaacgtgatttaactgccgggaccgttggtaaaacagttggtttgaccatgatgcctgagcacattgctaaagcccacttgcgcggtgatattcactggcatgacttggattacacaccactttcaccaatgactaactgctgtttgattgactttaaggatatgctaactaatggcttcaagattggaaatgcctatatgactagtcctaactcaatcaatgtggctacacatcaagttacgcaaattattactaatgtagcttctagtcaatatggtggctgttcttttgatcgagctgatgaagtgttagctccttttgcagagaaaaactaccaaaagcatttaaaggatgctggcaagttcattgatgatcctgaaaagctggaagaatatgctaagagtcaaactaagaaggacatttacgatgccatgcaaggcttggaatatgagattaataccatgttctctagccaagggcaaacgccatttactactttaggttttggtttaggtacttcttggattgaaaaagaaattcaaaaagatatcttgcgtatcagaattaaaggattgggtagagaacgcagaaccgcaattttccctaaattagttttcaccattaagaagggcttgaacttacatccaggggaccctaactacgatgttaaacaactggctattcaatgttcaactaagcggatgtatccagacgttttaatgtatgatacgatcaagaaaattacaggttctttcaaggttccaatgggctgtcgttcattcttacaaggctggaaggatgaaaatggtaaggaagttaactcgggcagaatgaacttgggtgttgtaactgttaacttgccaagaattgccatggagagtcatggcgataagaagttattctgggaaatcttcaatactagaatgcggacttgccaccaagctttagcctttaagggtagacgtgcaattcaagctaagcccgaaaatgcgccaattatgtatcaatatggcgtctttggtaaacgacttaagccaggtgatgatgttaacgagcttttcaaaaatggtcgagctacgatttcgttaggctacatcggtttgtacgaagtagggacagtcttttatggccctgattgggaacacaatgaagaagcacatgattttacaattgagatcgtgaagaaaatgcatgacttgtgtgctaagtgggaaaaagaggacccatatcattggcattacagtttgtactcaactcctagtgaaagtctaactgatcgcttctgccggctcgatacggcaaagtttggcaaggtgaaggacatcactgataaggaatactacactaattcgttccactatgatgttcgtaagcacccaaccccatttgaaaagttgacttttgaagcaccatatccatattatgctgcaggtggttttatccattattgtgagtaccctaacttgaagcaaaatccagcagcccttgaggcagtttgggattgggcttatgacaaggtaggctatctaggaactaatacgccaattgataaatgttataagtgcggttttgctggtgaattcaagtctactgccaagggttttgaatgtcctaagtgtggtaatcatgatcctgctacttgtgattgtgtcaagcgaacttgtggctacttgggcaacccattgaagcggccaatggttcacggtcgtcatgaagaaatcgtgcaccgggttaagcatatggactttggcatggaagatagtttagctaccgaagaagaagtaaaaaaaggtgagtactaatgcctgaaaaagataaaaacactcaagaaggaccagatatccggagtaatttgatcaaggttaatatgggtggggataccatgtttgtggatcctgaccaatataagccacagttagatcaccaacgtgagttaaaaagaatgcaccgcaagccgaaaaatccaaaaccacaagagtggaagactgaggattattctaaacataaaattgcggattataagccatttaactttgttgatggtgaaggcgttagatgtagtctttatgtttcaggctgtttgttcgattgccctggttgctataatttagcagcccaaaactttaattatggttttccatatacgcaagaattggaagaccgcattattaaagacttgggccagccatacgtgcagggattaaccttactaggcggagagccattcttgaatacttgggtttgtttaagaattattaaccgaattcgaaaagaatttggccacagtaaggacatctggtcctggtctggatatacttgggatgaattacaaaaagaaacacctgataaaaaggaaatgttgtctaagatagatattctagttgatggccgctttatgaatgatttaaaggatttaaccctgcaattcagaggttctagtaaccaacgaattattgatgtgccaaagtcgatgaaggcaggcaaggttgtcatctgggataaattgcaaaaataagataaactaaagtccggaatgattttctggacttttttgctaggtgaaaaaatggaagaaaaaaatattaaacaagttgatcaaatcatgacggccttgacccaagtgattgatccagaattacaagttgatgtagtaaatcttggtctgatttatggcatcgatatcgaaggagataaggcaaccattaagatgactttaacaattatgggttgccctttatctgattatttggaacaacatattcaaaaagctgttctttcagttgctggaattaagtcttgtgacattaagctggtctggtatcccgtctggacgacagagcgtctttctagtgcagctaaaaagcaattaggtgtaactaaccatgatgatcaaattaagcaggagaaagccaccaaagagaagattatcgacttttcagtaccgatcaagaaaatggcagatgaataccctgactttgttcaaattatgtacgattgtggttttactagaattaaaattcctggattgcttaaaacggtggggcgtgtgatgaccattccattgggagctcaggcaatgaaacttgatttggctaaagtgaaaaaagcatttgaagataaaggatacaaggtaatcaatgactgataaaaaaagacaggacgcaatcctgaaaattttgcattatattcaaaacggcggcgattttgcgaccgcaaagaagatgtttcaagaagaattcgatcaggttgatgtggccgaaattacagcggcagagcgcgaattaatcaagcaggggttaaacccagcagagattcaatacctgtgtaatgtgcatgccgatgtctttaagggtaatatcaaggagaatgcggtaaatcctgattttgctactccggggcacccggtgcatacgattaagctggaaaatatggtactgaaatcattggttaatgacgcactcttgccagatttgaaaaagtatcaagcaggtcaagatacactggataaaatcagaaaagaattgagtgatttggcaacaatcgataagcattaccgacgtaaggagacctcgctttttccattaatgaataaatatggcattacagctccgcccgaagtgatgtggggcgttgatgatgatattcgcgatttaattggggatgcaagcaagattgctggtgaggagcatccagataaagatcagttggctgaggcaattaaaaaggcgagtcatgaagtgcttgagatgatctttaaagaggagagcattatgattccgatgattgacgaggtagctgatcaagatgattggtacaacgttaaacgcgaagagagtcagattggctataccctgattcgcaagccaatgaattggaagccaaaggaagctaaaaaagaagcagggcctatttctgttagcaatctttcatccttcctcattaattttgaagaaggaaggttaaatttagagcagttaaatgcaattttggatatgttgccatttgcattgacctttattgatgaacacgataaggtagcttattttggcggcggtgctgagatttatccgcactcgcgcaatgctattggcaatgacgtattctcgtgtcatactgctaaaagtagaccgttaattaaaaagatttttgcgcaatttcattcaggtgaagttgacaagtatgagtttcactttactccacacaagatgaagcgctgcttatacctacgctattatgcagtacgtgataaaaatggaaagtatctgggttgtcttgaggtagcacaagatgtgacagaaattagaagctggactgaagaaaagaaaaaaatttaacttgttgggctgtgttctagtaagggatgcagctttttcttttgccctcgtgcaaaaaatcacaattcttgctagactagattgagagaatgattaaaaagaagggaagagagaaaatgcgcacagcacatggaaaacaaccagctgatgaaatcaaattgcattggcttcttctaggccaattactaacgtggttgggttccagctttatttggccatttacttcagtttacctgcacgaccatcttggcgtttcactagctttagtgggtgtcgttttgctgttcaactgtgttgcaaatatgattgggtcatttatttcaggctggtgctatgaccatatggatccatatgtcttgctgattgtgggggctgctttagatgcggctgtcttgtttggcatggctttgaatcatagttggccgttatattggctctggatgactttaactggctttttgggtggctggaatggagcattgattaactcgattgctactagtattaaatctaagccaggtcgttatgtcttcaatatgatctactttgctcaaaatgttggggtcgtttgtgggacattagcagtaggttatctttatgattattcagtgactttattatttgtcattgctggtcttttattcgttggcgtttgcgttaacgcaattattaattatcggccaatgattcagttccacaaggagcgtttggctaacaaaggcgaatcaaagaagaaggcctttgagccgatgccaaaatacaatctgattatgtcaattggcttttttgttacgatcgctgtaatttggttgatgtacatgaactgggaatcaaacttgtctgtctacatggtttctttgggcattccttttcatctgtatagtttgttatggaccatcaatgccggaattattgtcatcgtgcaagctatcttaagtcgttttactatctttaagagcttatttagacaaattttatttggcactttgatgtttgcaatttcttttgttactttgatttttgccaaagattttgcacatttcgccttatccatggttatcttaactttaggcgaagcaaccgcaatgccgtcgattccaacttatgtcaatgatctgtcgcccgattctagtaagggcaagtatcaaggcttaaccttgtctgcatcgtcaattggtcgagctctaggtccattatttggtggtttaatcattgaagatttcggctatattcaattctttgctgttgattcaattggtatctttttgcttttagtcatgcttattccaatgcatgcgaaactacagaaaaaactaaaattatttgtaaaataaaaacaacatgatagcgttaatttttttataatgctatcgtgtctttatatgaaaaatttttccactagggaggtaatttaatgtattttaacgtacgcggcggtgctggtgacattactaaggctaatacttcagcgcgtctacaagataatttatatttggccgttaactcagaatggttggaaaaggctaaaattccatctgatcgttcaagaaccagttcatttgatgggatcgatcttaatattgaaaagaacttgatgcaagactttgcagattttgctgctggtaagaaggaactgcctactgtgcctaacttcaagaaggcagttgagctttacaaggttgctaaaaactttgacaagcgaaatgcggatggtgccgcacctattcaggcagatttgcacgaaattttagacttgcgcaacttcgctgactttaacttgaaggcagcagatttttacaagaatggttttgccgttccatttgctttcagtgttgaagcagatatgaagaatactaagattcactcattgaattttggtggtccaagtactttcttgccagatacgactacttacaagactccagctgctgagaagttattggatgttttgaaaaagcaatctattaagttgttaacaatggccggacttgatgaaaaggacgcagaagattacgctgacttggcaattaagtatgacgctaagattgctaaggttgttaagtcaactgaagaatgggcagattacccagcaacttataatccagtttcattgactgactttgaagcaaaattcgattccttcaagatggattacttcttgggcggattatttaccaagaagccagaacggataatttcaactgaaccacgttacttagatcacgcggaagaattgttgaatgaagaaaactttgctgaaattaaggcttggatgctggttaagtttattaatggcgtagcttacagcttgtcacaagatttccgtgaagctgcctttccatttagtcaagctttgtcaggccaatctgagctttcaagtggcgttaagcaggcatatcatattactaatggtgacttcggcgaagtagtaggtgtctactatggtcaaacttactttggcgcagaagctaaagcagacgtgactgatatgattcacaagatgcttgatgtttatgaaaagagaattcgtgaaaattcatggctttctcaagcaactaaggataaggcaatcgttaagttgcgcgctttgatcttgaagatcggttatccagacaagattgaagaaatctatgaccgtttacaagttgatccaactgctagcctttatgaaaatgaagtgcaatttggtcgggaacaaattaagtacaatcttgagaaattgtaccaagatgttgaccgtacggtatggttgatgccaggtgatatggttaatgcatgttacgacccacaaagaaatgatttaactttcccagctgcaattttgcaaaaaccattctatgacttgaaacaaagtcgtgctactaattatggtggaatcggcgttgttattgcacacgaagtatcacatgcctttgacaataacggtgctcaattcgatgagtttggtaacatgaagaattggtggactgatgaagattttgctgaattcaagaagagaacgcaagctgaaatcgacttgtttgatggtattgaatatggccctgtaaccttgaacggtaagcaaatcgtgtctgaaaatattgccgaccaaggtggtttaactgctgctgttgaagctaataagggtgaaggtgctgataagaaggcaatgcaagagttgtttgaaaactttgctcgcgtttgggcaactaagcaattgccagaatcaattaagacgcaagtatctatcgacgttcacgcaccaggtccagaacgtgctaacgtgcaatcacaatgccaagaagaattctataaggcatttgatgtgaccgaaaacgatggcatgtggcttgctcctgaaaagagagtagtaatttggtaagtaacttttcttaatatcgagtatgaaaaattagctaaattacatataagctcctataataagaatgactacagtgctgctactacactgcagccctttataacttattacccattaataaattttttgcactaaaaaaggctccctgttgggagtcttttttagtttagtaattatttagttttagctgtcgagtaatcctttggcttaatccgcttaatgtaagatggatttggtcgacccaggattaatggtacacgctcgattacggtatcggcgtattctaagccgaaccaggaagctgggttagaagacaagttttgcaagcgaacccgcgcttccacaagccatttttcatagccaaccaattgtgtttgtggactgatgacgtcgttaacaataacgaatgagaagtcacctacgtcacgacctgggctggtggtgtattcctgtggttgtggctcaatcgtaccgtcggcgatcaagtcatgaacgatctgacgaatgtagacattcacactagtttgcttcttaaagccgaggtagagctgaatgttaattacgttcttcgtaccgtaagtgttaacagcatattcagcggtaaatggctcgttagtaacattgacagtgacaaaccagtaagcctttgctcgtttaggtcttttatccaaaattgagtacaggatttcacgtttgatgaacttattgtacttaacgttggccatgtaaaccaagttggtagcataagttgggtaattttcatcgtgacttaagttcgttaacatgtcggtatattcatctaagcgaacgtaagcattgcgagcttcacgcttgtcacgaaccttgttgccgtaataccaaacatacattacgaagccgatagcaccagcgatgaagagtgaaacgtaaccaccatgagtaaatttagtcaaacttgaaatcataaacatgatgtcaaggacaccgaagaagatcaagaagatccagttccaaacagtgttgactttcttcattactaaccattcataaagcaggatggtagtcattaacattgaaattgtaatggacagaccataagctgcttccatgtgagctgaagtttggaaatataagacgattgcgatagtagcaacacagatacccttgttaatggaaggaatataaatttgtcctttttcgttagatgggtagttgatgttcattcttggcaagaacttcaagcctgaagcttctgcaactaaagtgaatgaaccggtaattagggcctgagaagcaataacagcagcaatagtagccaaaatgatggcaaacaatctgatgttagctgggatcatttcaaagaatggattgagcacaccgccgtctgcaggacggtaagttgggttgttcaaaatccaaacgccttgaccaaagtagttgagtgacaagcaaacaaaaacaaatggccaagaaccaataatattgcttttaccaacgtgaccaacgtctgaatataaggcttcggcaccagtcgtagctaggaaaattgaccctaaaataaaaattccagccttattatatggactgactaataatctaatagcgtaaattggattgattgcttgcaagattgaccagtcaccgaccatgttcattacgcccattacacccaaaaaagtgaaccaaaggaacatgattgggccgaaggctttaccaatgatactagttcccattttttggatagaaaacagaactagcagaatgactacagtgatggcaataaccatgttttgagtagaaacgggtacattgccgccaaagttcagtcctttcagtccttcaatcgcagttgtaactgtaactgctggagttaaagtaccatcggccaaaatagcggctccaccaattagcgctggtagaactaaccatttagctcgttttctaaccaatgtgtataaggcaaaaatcccaccttctccgtggttagttgccttgagggcaataattacggtttgtaaggtagttagtagcgttacagtccaaagaaccaatgaaattgatccaatgataaagtcacgatttacattaccaatgccgccgttgccttcgacaattgatttcataacataaagcggactagtaccgatatcgccgtaaacaataccgatggcgattagtaagccggccgcgctcatgcgtttagctttattattcattatctcgttatctcccacaacaaaattgtagttttaataaaaaaagaaaatgccacgatgacattttcccttattgtacctattttcgtctatttcgctggacaatgcaagtgagatttgtcagaaattgaatctagaatttggtgatgataaagttaatgcattataataaaaaatatgcagtaaaaaagctcccatacagggagcctttttgatataaattatgaaagtgatgaaggaatcttagtacgttggtcttcgtcccatttttcccatgcttcataagtaagcatttcttctggcttaataccagtcttttcttccatggccttaagcaagtccttaaagttgtagtcgtggtattgtaacacatgatcaaccaacttcttgcgtgggaagtggatgttgtttaaaacatagcgattgatatcaaccatgttatgattttcatcgtaaaggttgataacttcaagatcgtcttcatcgaattcagcgatgtagaagttagcgaagacctttaagtaatcaggttgttctttgaattcttcctgtggcatagtagtcttgttagcttctggcattacgactttaaagtcgtcgttttcttcattttctttatcagcttgagcttgagcgttcttttcttcttcagtcaaagttgttacccctttatttataaataaatagatacaaagtcaataataattttacagacttctacaaataaaagcaaatagaagtggttgagagatgcaaaagtatagaagtcagttttgattagtaaaatggagtaaaatgaagtaaaatataaatgtaaaaagtaaaatgaagtaaaatgaggaaaaatatgtataatgaaaatccttttgatgctgaatttggcgggatcccagagctatatcttgattttaatgatgatgcagttaaatttgctcaaagagcccatcgtctcaagaaacatccaacttattctctctttattacaggggtacgaggttcaggaaaaacagtttttatgaacaaagtgggtaaagaactaaaaaaatataaagatactatggtagtcactttgcacaattctgatgatctttttcgaatgatgtatatcaagctagtgcctatgctagataaaatcaaaaaatggacgccatcaatttctattaaagttccttttgtatcagtagatttcactgaagcaaatgaaaagcatgatgaaatatattataaagtagaaattaacaagattcttaaagctttgaacaaagtggggattcgtgttgcattttgtattgatgaagtgtcaaatacacccacaattcaaaaattggctgaggaattcaacgactggagcctaaataactatcaagtttcagtgattatgaccggactattaagtgaagtggcggaactatcaggcacacataatttaaccttcttggttcgggcggatagatttcacgtctctaaactatttgcgtcgtcaattgccagaacttacatggatgtattagacataacagctaagcaagcagaaattttggcagatatgtcaaaaggctatgcttatgcatttcaattgatcggagatttgatgtatgaaaatttaagtcaaaagatgacgtttgaaaaagctttggaatatactaaacttagattccgtgatgtacttttcaaccaagcgtatgatgtaattgctcatgaattaacggatgtggattttcaatttttgtacgctatggcgcaagataatagtattagttcaattattaggactatgcaaaaaagtaagcagtatgttaatagctatcgtgcaaaattaattaaatatgatctaattaagccaataattaggggaaaggtcggctttaccttacctttgtttagagatttcattcaagcaaagtatgatgagcttaactggggctagaatttattgaaaaaattcgacagaaaatcacagaaatgaacgcagatccagtttggagggatactattatggactatgagactaagctagctgaagagcgtgaatacggtgaagaaaaaggaattttaagtgcaattaagaaaattatttatcgtaaccggagctatggtgtatcagattccaaaactttggaggatctgacagaagactaccatgattctgtttcccgggatcaaattgaacaaatgatgaaagaagcctaggtctaatgaaaatagccgctgctcaatgtgagtaacggctatttttttacttgttatcatcagcagcagagctggaacttacggcagatgattgatcgttgcttgaggaagccgcgctggattggttgatggatgataatttaagtaattattcttttgaaaaaatatttcttacttgttggagtaaattatcgaattctgttgattcttttatgtggccgattatttttccatgacgggcaatgaaatcatacgatagcatttgaaataataatgcatccccatttgtgtgactagcataatctagcacatagaatctaaatggatcatctgtaatatggttatgagtaattgctagtcctattactaatccagactttttagtgtaagcatgtctgctcactactaaatagcgtctacgaatatttcctttttcagaatcatgtccacccatttcgtgaccagcatgtggttcagcatcgatcattattatgtcaccttgatggacatcaatccttctcatttgctagttcctttccgacaggtttgacttctctaggattgtatcctaattcttggtattctcgctttatttcagtatcataatcataatcgtcataagcggggtctgaccataaatcataattgtttttagcaattcttttgtatacaatatcaccgtttttatttacatcaacagagaattctgtattaagtggaactttgatagtacttggaatggtaagcactattgaatttccttgttttctagccttgactaccataataagccctccttatgctaaaaatattttattatttaagtatatactgtgaatacagtgagcacaaacaaaaggagccacaaattggctcctttttcgtttgcttacttgttatcatcagcagcagagctggaacttacggcagatgattgatcgttgcttgaggaagccgcgctggattggctgctggatgattgttcctgctggtgatcgcttgaagaagatgaagaacttgattgatcatctgacttcttgtttgataagctggacttcttggactgctctttatccttatcagatgaggattttgcagaatcatcctgactagaattatctttgttagaatctgcatcagaattattagatttttgctggtcaggatcagcgttctttttattggaattattataggaagtattattgtgcgtttgagtgttggcatggctaatgtaagcaccggcgccacctccacctaagatgaacatcgcagcaataacaccccaaaagactaatttcttcatattaagacaactctcccttatcttagaaaaaatattaacgaatttgagccaattggtgactttgaatcgttagttatagtgtaagacatctggccggcaggttgattacaaaatactcaattttaactaattattaagaggtagaagaaaaatatgaattacgaattaactgaacaatcaatccaatatgtatttggcaacaagaagtataagaatgggcaaaagacccgcaatttgaagaacgtgaagactggcgctaaggcagatgagttgcaaaaggtgggtcaagcaattgctagtttgcaagaagactcacttgatgaagcatacttagtgcagaagtcacgtcttgtaccagcagctgaataaattaacgaacatatttaggaaataaggagaaaaaatgatggctaaaactactaagactatgaagttaactttcttgaacggagaaaagaagaaaattagtattacgttgggggatgcagtcgataatctaactgcggatcaagtacgcggtgcgatgaatacgattgcggaagccaatgcattcgagaaagacggtgttgcatattatcacactcctcaatcagctgcatacattgaacgcactattactgatatctttaatgattcagcagaatctgcagttgagcctgcagctaagcaagactaatctggacttgcttgaccaactaattagcttggtcaaaaggctcaggagaaaatatcgcaagatgtagagttcacacttagacctttaacagaaatcgtatagtaatattactttttcaattgattttgttacatcgttgtaaaatttaagaaaaagtaaagaaacagtaaagcgggcgtatgctcgctttttcttgttgtgtctaggattacggcattttgttattttagatttgtgtgaatggtattgggatagggaataggtgaattattacaaaagcaagattgtagtcaatttaacttgctattttttcaagaggttagtacaatatgaatcgtggtaagtaataggacgtgcttcaggcgtgtcgcctgtacgcatgctgatccttcagcaatgactactacctcatgagagttataaactcatggatcttgctttgaagaattttgtacattataggctccctacatgctgaacctatggcctattacattttttatatttcaaggaggaaaagaccacatgaagaaaaatttaagaattgttagcgctgctgctgctgctttattagctgttgctcctgtcgctgcttcagccgtttctactgtttcagctgcacctgttactaatgtaacccatttgggtaatgtaactttaccagcttctggttctactgttaacgttaagccaaacattagtttaaatactaaggctggctcagtaagtggtgctatttcagtatcattctcagctactgttgacggtactactgctaacgctaactttggcgttaacgcatcaaacccttcaaagattcaacttttcaagggtagccaaaaaatcactgacttaaaccaagttactgaagctaatgctggtgacgtttacaaggtttcaatgactaatgttggcttgaactttggttcacaaaatgctaacaagaaggttactttgaacttcggttctggctgggctgcacgtacagaacaagatgcaatgagccactcactcgaagtaaaacttgacaagaatggtgtagttaacttataccgagttgttatggacgtaactgctaaagactttgctaacccagcagttgttacttggcacaatggtactactggcgcagctgtaacttcagcaagcattcaattgtacgctggtgcagatgacggtaagatgaacgtttcacaagttcttgcagctgttcctgtaaaccaaaccaagggtaatgcatactacgctgctcaacttggttctgaccaaagcaacattagctactcaaataaccttaaggatgctttgaaggctgctggtgttgaagtagatgcacaaggttggtttgttgctcctcaatcatttactttcaatttgattgcaacttcaaacaagaacaacgctactgctactttgccagtaactgttaacgttccaaacgctaaggtaactactgtaccaagccaaagcaagactattatgcacaatgcatactactacgacaaggacgctaagcgtgttggtactgacaagcttacccgttacaactcagtaactgttgctatgaacactactactatcaacggcaaggcttactacgaagtaatcgaaaatggtaaggctactggcaagttcatcaacgcagacaacattgatggtactaagcgtactttgaagcacaacgcatacgtttacaagacttcaaagaagcgtgctaacaaggttaccttgaagaagggtactgaagtaactacttacggtggtacttacacattcaagaacggcaagcaatactacaagatcggtaacaacactgacaagacttacgtaaaggcttcaaacttttaattaagtctatgtagtagataaggaaaacgaggcaaatgcctcgtttttcttttgctctaaaaaaggcgccgctgttgcgacaccctcagaaaatattattgttatgacctagctctatttcagaaattcttctaactgcttatcagaaaatacattgccatacttttgctttaattgctgcaggatttgttggctagtgcagccaacatctttcaaagaagcgactaaggtaagtgcacctgttttaaggcctttcttttcaccaacttgctcgcgttcaagcattctagtttcaaagtccataatagtatccctccattctggatcagcattcattgattcaatgcgtttttgcgctttatcaaaaagcttgtcaccatgtactggcaaatctttcatgagtttgactaaattaagtaatgtttcagtctcagttccgtcaggaactccgtttgagttaattataattttagtcaagccatcctgcaatatatctgcatgattgcctacattgatagtttggtacgtagacttaatggcaactttttgcttagttttgaacgtgcaaagaaaaataatgaagacatttttcaaatcattgtaagtatagccctggtggagagtatacctttgatcgttcttcgaagcataatagcgcatgcgacgagcaatatcatcatcgtctgaccgctgcatctcaatattgtaaaggctgccgttaatatcctcaaccaaaatatcgagtcgaatatctttttgatctcgatgctcgggatcgatgattacttcttgcttcttcggcggaaagatcttcttaattgggatctccggcagaattccttgcaaaacatgcttgcagaaagctggattggacatgatttcgccaaaaaccttatcttctgaaaaaccaaaccataattctttttgtttgtgcgtatttttcattgcgcacctctttctaaaaaatagtaggataaaatttaccctctattgtttattacgcaaaaaatcggcaaaattttttataaaattgttttttcagcataataatttctagctatacaatcaatgcttcatcctgtataatactattcaatatttaaaataatatagatatattcaaacatagggagtgtgatgaatgtgtcagcctacaagcaacgtaacttggggattattagcttgcccactgacataaaatatcgtaattggtccaaggaacttaccaagcggagaatcgagaatgactcgcaattagagcaatacatcaagtatgacaataagtatcgactcaataagaacacattggcagtctatgaattcaagcaaaatcctatcttaggtaaatataaagcagtagccttcgacctgaatcgtggaattgtgcttagtcagaagtcaacacatgccatgatgcaaggattaatgcggcatgccgtacattgcgatatgatttggcagagaatgctagctcgcgaggctggagttgatatctatcaagggattgtcatgtacaatgtgctttatttttcaatgcatgcatttagtggaaacttcttcacggactggatttgcttgcactggattaaagacttccacgtcaaacgccatggtcaagctattttcaacagtattgcacttgataaaaatggcttggtctataattttgcctttgattcgcctaagcctaatcttactaagataattggtcagtatctgtttcataatcattattattctgacttatattatcagcatatgttgcaagaaaataatcttcgcgtaacagccattaattctgactcaatcctgcataattccaactattatgtgcaactggatttgtatgctgttgatagtttcaaaaagctagctgacaaattctataatcatgttttaaacttgcatctacttacaattgtgaaagaatttaagccattagattatttgcaccgtgaacaccacttttttactaagcagattattaagatcagatataatcgttaacagctctcatgagctgtatttttttgcacttttttgactatcatctgttcttcgtcaggtactatctgacttgactttgcttatcgtagaaattaacaaacacatgcgacacttgggattagagcatctcaccactaagtttttctgcggattcaatcttgctaatctaatagtgcacaagcgcttgtgacatcacttaaggagtgtcacaatgacaagtcaaaaatatttcgaagaagcatggaaaaatcgtaagttagttggtggtgccttaaaggcggcacatgttcgaccggactatcatctctatgaagatctgttgcaagaaggtgtaattttgtatgccgagatgttgcgcaaattagatgggcaaaaggttcgcagtgagattaataagcttagcttcaaaagggttctttggcagacaattgatgctctgcgccgagaacagcgcgtatgtgaacgcaatactgcaattgacaaggcttatgacttaggtaaaacagaggcatgggataatcttgtagctttaaagaatgagattaagaaactaagtcaacttgagcaagtaattctttttgagcatttgcttgagaaaaagacaattacgcagctagttaaagaatgcggtataccgcgtattacgttgaaacgattgaaaaagcagcttttaggtaaattacgtaatgtgatggaacaataattgaaatgaggtaaaatatgattaaaataaaaagtcgatatccgagaatcactgacgatttggtctttggtcacgtcatgagcaataagaagaattgaatttcagactggtacgcacgttaaagtttttaattctaagggcaataatcatgacctgaaccaaaagatgattgacttcttggattacatgaatggaatcatcaatcaccctgaaggttacatcgccagcttgcaaaaggatgtcgaccattacgtgaatagcggaaagtgggtcgaagacatggacaagctagaatacgaaatgaatgaggttgctaaaaaagtaaaaatagaagatgctaagaagctagtcctaactattaagcgaatggacggaactaaagatacagccctacaagaactcacaaatagttatggcgagacgcttaaccgcgatgaaattatcaaactagtacataaagtctatcagtaaacagtaatcaatagttcacagcagaatatcttccaaggtgtcgcgtaagcggcgccttttttcagagcaaaagaaaaacgaggcatttgcctcgttttccttatctactacatagacttaattaaaagtttgaagcctttacgtaagtcttgtcagtgttgttaccgatcttgtagtattgcttgccgttcttgaatgtgtaagtaccaccgtaagtagttacttcagtacccttcttcaaggtaaccttgttagcacgcttctttgaagtcttgtaaacgtatgcgttgtgcttcaaagtacgcttagtaccatcaatgttgtctgcgttgatgaacttgccagtagccttaccattttcgattacttcgtagtaagccttgccgttgatagtagtagtgttcatagcaacagttactgagttgtaacgggtaagcttgtcagtaccaacacgcttagcgtccttgtcgtagtagtatgcattgtgcataatagtcttgctttggcttggtacagtcatgtccttgccgttagcaacattaacggttacaggtaaagtagcgtcaacaccattaattgatgaagttgcctttacattaactgagaatgaagttggagcagtaaaccaaccagcattgtcaactgaaatattagcagcctttaaagcagcgttaacatcagcaactacagccttttggtctggcaattgtgatacgggcttaccatttgaaacttggtaagcagcaaagttctttaagatttcactagcaacagttgaaacgttcaaacgaccgttaagaccagcagttacattaactgaacccttagttacttgtgaaccgtttgaagcgttgtagaagttaacaccgttagcatttgaaaggtcaagtgcgttaacgtttgaaacttgaactgagattggggtagttaaagtaccattttgaccaagttcaacctttacagtatcagcaaacttaccgtcagcacctgcaaatttaacattgctgttctttgagccaagagtgatagtcttgtttgcgttagcagtaccaaagttgaatgatacgccacttacagtaacagtgtatgaaccattagtaagttttgagaaatcagtaacagcagtgccctttgagtcagctacagaaactttaccattcttagtatctaaagtaccagtgtatgattggccattgtaactagcagtaatgttaccagtaatgctaccgttaatagtttgtccatttacagtagaagctgcagtagcagtaaggttaggtgttacatcaacatcgtattttgcatcagctggagtgttgattgcggtaccatcagcattaattacagtgtttgctgtgttggtagtggttgcaacggtgttgtcagcagcgttaacagaaacggctgaagcagcgacaggagcaacagctaataaagcagcagcagcagcgctaacaattcttaaatttttcttcatgtggtcttttcctccttgaaatataaaaaatgtaataggccataggttcagcatgtagggagcctataatgtacaaaattcttcaaagcaagatccatgagtttataactctcatgaggtagtagtcattgctgaaggatcagcatgcgtacaggcgacacgcctgaagcacgtatattgtgtaatcgatttttgccaagcaatgaaagggtggtttctgtcctcttatttgcttggggttggttgggtggtttttgtccgctgcgcagatacttttgtgaaaaaagagtacgatgcgatttgatgatttagagtgtcgtttttggttttgttaagggatgcttgtaaaataataaggtaaagaaaatctaaagaagtaattttgtgaaaaagaaatcgacattttttgcgtacttatatattgtcaaaattaagatatgtaggtgataattatgttaaataaaaaggataaaactaaaattcaagaattaactgataaaacagtggacttgatcgtagaaaatatggggaaatcgcgtaaagaagcggaacaagattttcaaaagtcagatacatatgcgttcttatggctagcgaagcgtaatattgaaaatgagcaccctattattttgtacagaatgtttaattctgagttaaaagctaaaccaatagatgaagaacaacaaagttttattgactttatgactgataacacaatcgagttaattacacagaatactaattggggaagataaaaggcaactaaagttttcaaatctacaaaggtatattggatactagttcactcaggacataatttagatgaatcttctcccgaagagctgttttatatgtttagaaataaacttagtataggtaatccactaccttcatctacgctgaagttaacttattaaaaaatttatataagttaaataatattattacaaatgttacttttttacaataaatctgttgaaacgcttgtctagacctaatttgctagatacaatggaggtgttatattaaggaggataattttttatgaagaagagacttttgaccagttttgctgctgccgcaatgcttactcctgtagctgtgccagcagtaaatactacgatgatgaatcaagcctcaagccaacgagtttctgccgctaccgctgatcaaactgcatttttgaataaagctgctaagcaagctgtgaaagcagctaaaaaatatggaactttgccatcagtgatgattgcccaggcaataactgagtcaggctggggaaagtcaggattagctgtgaatgctaataacctttttgggatgaaggctgatgattcttggacaggtgagacttatactgccaagactagagaagaagataaaaacggtaagagctactatattactgctaagtttagaaaatacccatcttttgaacaatcatttgaagataatggtagtaaattaagaaatggtgtttcttgggatccgttgcgttataagggcacttggattgaaaatgcatcaacttatgcagctgcaaccaaggctttgaccggtacgtatgctacagactctaagtatgataaggcattaaatagtcatattactagttctaatttgactaagtatgatccagtaaccgttaatactactagaacttatactgctggcaaggatagttcaacttataattggccaactgctccatctgttgccagtgctattggctctgttaaagctggtgaaaaagtagtagttaccaagactattactttccatgatggttcaagcagaatgtatattgatggtcgtggttgggttaatggctcagttttggacaagagcagttctgcaactaaggaaccagtaactcaggcacctaagaatgtgccagctgtttctaagaacttgatgcataatgcctatgtttatgaccaaaatggtaagaagctaaagggcaagatgtacaagaccagtgatgaaaacggtggtaagtggatcaatacttatggtaccaagaccatcaagggtaagacctactaccgtgtcggtgaaaatgaatacattgcagctggtaatattgatggtagcctcagattcttgaagaagaatgcttatgtttacaatcaatatggcaattgcgataacaatttgaagcacaagaagaatagccaaattgctacttacggcagtgctataactatcaatggtaagaaatactataaggtaggtattcgtcaatacgttaagaaatcgaacttcatgtaattaaggaaagggctttgttgtgaagatacgcaaatttttaattgccttaattgcgcttttggggttagtcggcgtatcatcggtcagtaaccaggtcaaagccgcttcgattaatactttagcgaagaaatatcaatatagtggtgtcacctatttatacaagatgctcaaactagaggggattaagtacaataaattccctggtgttgagtatcaaaatggcaagccagaaggaattgtcgttcatgagactgacgatcccggagctactgctcacgatgaagcaatctactttaaccgcgagtggaaaaatatcaacgcttacgtcaatgcttttgtagatagtaagcaagtcatccaaatgtattcacctaataatggtacttggggcgcaggaccgaatgccaacaatcgctttattcaaattgagctttgtgaagaagatagtcgtgatgcctttgctaagtcagttaataatgatgcaatttatattgccaagttgcttcatcgttacaatttaaagccagacaatgcttgcgatgatggtgaagacacaatttggtcacacaaggcggttagcaccttcttaggtggaacagaccacgttgaccctgatagttattttgccaagtgggattacgacatggatcagttttattctttgatcgagtattactatgacttgcaaaagaagaatgaaaatactgatactaaggatccaaataagattaaggacgaagtaccagcagaagttcaaggtgcggtaactttaggtcacgatgcttatgtttatgacaagaacggcaagaagaccaagatcttgaagttagctggtagtccggtaaccgttttaggctacaagataatcagtaataagaagtactatcaaattggcaagaacgaatacgtagtagctactaatattgatgctactgctagaactgttaagaagaatacatatttgcggactcgttcaggtcgaattgaaaaaggtaatttggtcaagaagggtagtcgggtcatgacatatggcagcaagattacaattaaaggtcaaaagtattatgctttaaatgctacacaatatgttttagctagcgatattaattagaaaaatacgtcttaaaccataaataatgggaattaagacgtattttttgtataattcttgtgttgaatgtgaaaaggggagaatttaatggcgcaattatcattatttttggtcgtcttattagcgctcgtaattccaatatttatggcgcgtttcaaaataagcactgtaccaacggcgattgctgaaattatcgtcggaattattgtaggttcgagcggatttaatatcgtggtttcgatacatgatttaacatttttatcgaacctcggcgtaattttgctgatgtttttatcaggaatggaaattaattttgacctgctacagcgcaagaataatcctaaggctaaatcacaggcgggaaaaactgtcgatccgttgccaacagctttaacagctttcgctggaattgtggtaatggcctttgttttggcatatgttttaaagctgatagggctatttagcaatgttatcttggcagcgattatttttatgaccattgcattgggtgtagttattgctaccttgaaggaaaaggatattcttggccgaccgattggtcagacaattttgttaactgcggttttgggcgaagtaataccgttgctcttattaacgatttatgcctcagttaatggagggaatgctggccagctttggttgattatcttactgtttatcgctgcgattattcttttgcggcggtttaagcaaccgtatttatggtttagcaaagtaactaaggcaacgactcaattggatattcggttagccttcttcttgatttttgctttagttactgtagctgagcgagttggtgctgaaaatattttgggagcattcttggccgggatggtaatgaaattattggaaccaagcgaggcaactaaagataagctaacttcaatcggttatgggttctttatcccaatcttttttattatgactggcgtgggcttgaatttaaagtcactatttgctcatccatcatcattgatgttgttgccagttttggtcattttcttgttcttagctaaagctcctgtagtttttctttatatgcgctattttgaaaagaaaaatgcctttgctggtggctttttaactgctactacaattacgattgttttgccaactctacaagttgctagaaaattgcatgcaattacttaaacacaatcagatgcctttatcttagctgcggttattgtttgtatcgtgagtccgattgtctttaattcaaactttgttttatcacctgaggatcggatgaaagaaactgttactattgtgggtgccaatacttttacggtaccagttgcacatgatttgcacgataattggtatacgatcaagatgtttaccgatcagcaggaccaatacgaaacttatgatagtagggttaaaggtttaacattacttgataatttggataatcaaagcttagagcgtagtggtgcctttgattgcgacattttcgtagctgcagggcatcatgatcaagaaaatgcacgaatggcggaatatgccaaagacttgggagtcaaacgagcaattgcccgaatgaatgaagtcgatagcgatacgatggctcgatgccaggaggcaggagtagagttgttcaactttactaatgtacgttctgctctgatgcgagctttgattgagtctccaacggtctacaagattatgactgatactaacaatgtgttgtactcagttaaggtgagaagtacttcctatactggacgaccacttagggatctggaatttgtggacaagattacggttagtcgaattcggcgtggtgatgagtggttaataccacacggttggactgttattgagccgaatgatatcttgatcttttctggagaatttaaggttgctgatcgagtaaagaagttacttagtcatcaaaattagagataaaaagaggctaaatgcaaaaatcctgcatttaacctcctttttacgtaattaatgattttgtccttcaactgcttcaatgtcgccttgtccatcgcgctcaacaatagccccaattgcagcgattaagcctttaacaatatcggctaatgccattgatggagtgcttggtcttttgacaacttgttctggcaaaaatgggatgtgaatgaagccagctttaaggctagggaattctttagctcgcatgtattgcacttgataaaagatgtggttgcagacgtaagtaccggcagtgttggaaactgtagcaggtagaccaacagcgcgaatcgccttagccattgccttgattggtagttgggtgaagtaagccgtgtcgccatcggcttggataggttcaccgagcggttgataaccatcattgtcggggatgcgaccatcgttaatattaatagctactcgttctggggttaaagcagcacgcccgccagcttgaccaacattaagtacataatctggtttttcttgcacgatggcatcatgaacaacttgggcagatttattgaaaaccgtaggaatttctaatttgataatttttgcacccttgattgagtcaggtagttttttgactgcttcaatggcggggttgatcttgtcgccaccaaaaggatcaaaaccagttactaaaattttcaatggcttttcctccaaatttaaatcatagaattttttgctttagtcaaaatttgcattgtctctaaagtattgacaaatgcttcatccgctttttgcgtatcgtgttgatcaatcatctgggcaaaagtattaaattcagctgccattcggtgcggatatttatttaaattataacgcttaggttgctcatttctcatttcaactgtgaaattatcaagtgttcccgttgagccgtcaaaatagatactacctttttcaccttcgataaaagaacgtggcgttacatagctatcttttgatgccgtgagggaggcttgtttgtcaggataagagaggtgaagaataccagaagtatcaacgcctttttgcatgttggcataatattgcacttgatcaggcaagccaaacaatgccgagacaagatgaatgttgtagatatttaaatccattaaagcaccgccatcttttttaggatcaaaaaccggcgcaattttgccttcaagaaaggcgtcatagcggctagaatattgcgtataatttaagttaacaatatgaattggtgcgatcttgttcaattctttttggatttgtttgaagttttctaaataaaggttagtaattgcttcaacgatgatcaaccccttttcgtcggctaacttttttaattcttttgcttgagtggtgctctgaacaaatggcttttcacagattacatttttatcgtgttctagagcagctttagcaatctcataatgcaagaagtttggcaccgctacataaactgtatcgacttcagaatcagccattaattcttcattgtccgtataagtacgtttgatgttgtactttttagctaattcccgggcaatattttcactgcgcttagttgaggaaatagccgttacagtcatattcgcaacttgatcagcggttgttaaaaagtcatggacgatcatgccgctgccaataattcctaatttcatttttttgcctacttctttttagtattagtggttggtaaatctttagcgttagttgcagagtctggtactcttaagaagtcatggctgccgaagttgccataactttgaccaactttaacgtacattaatttacctagtttcatattaacaaagacattaaaggtagataatttattacctttaattacagccttaacattcattgattggtacttgcctaattttttaatttggctgaaaattttagcttgatttgtactttgagcagtagtgtcaaaaattggtgctgctgcctttttcatcaaagcttggtcagtacttttagcagttaaagtataagtgtaaacaccatcttttttgctttttttcattttataagcagaaaccaacttatcacttggattggtgatcatgtggttattcatgatggcatcggttaagtcggcataattatgaccggttagtttttcaaggtcagccttgtaccaagtatcttgtccattaatgtagacattgttaaggttgacccattcctcagtagaactagttttacctttgctagtggtttgattggtgatgtggtaaacagtggttttaccaccaaaggtagtgttagctaaggcaacttgattagaagtgtcggtacccagagtaacagattgaataacctgtcccgacttgaagctacttttagctttttgtacaacttgagtcttagtcagagctgaagtagccttcttctcttgtttactgcagccacctaataaaaagaggacagcaaaggataaaccgataatcgttttcttaagtttcatttttttctcctctatgcttcaataagtctattataactaaaaagtccgttgctcgttggagttacggactattcttttactttattttgtattaattttgcctaaatctacggccgatttcttgatagaagcaggtaccgtcaactttttgacttgattaatttgatcaatctgcatggtgaaattctttttgtgtccttcatccttataagtagaagtcacattaacatttttgatgtcgtaattctgatctacgttaattttgatttcgttgctaattggtttaacatcatcaagatcgatgccgattaaagcagtaaaggcagaatcagatacaattgcgttccaaatttttttgttatttcctttataagtaagcagataatcattgccgttttgctttaccttaaaatattttgcgttagggatgaaaggcatgagtaatgtgccgttcaaattgtcggtaatggcaccataggcactagccttagacaactttgtcttaaaccaacgctgagaattggtacctttcatttggatatagttgcttttaccctcaatccacattttatagtgattagagctgctagaaacattagcataaataatcgttggctttttagtatattgggcttcggctttttgcaaagacttgccattgcttaattcattccaagtagcgtgcattgaactgaatttcgttttttctgcactggttaaaatcgtcttggcagtaggtaaattagctgtcttttttgaacctgtcttagagcaggccgttaaaaagagtaatgctaataaaacggtaatgataatattttgatgtttaaatttcatacataactttctttcattaaattttttcttctagtatagcaagaataacgttacaaaattgaaaaaacacgatttttttagtcttaactctatgaaaaaatttgtgaaatgtgtaaaatatggatgaaacattgaattttaaaaggagatatttcatgtcaaaattagttttaatccgtcacggtcaaagtgaatggaacctttcaaaccaatttactggttgggttgacgttaacctttcagaaaaaggtgttgaagaagctaagaaggctggccgtttaatcaaggaacacggtcttgaatttgaccaagcttacacttcattattaactcgtgctatcaagactttgcactttgcacttgaagaaagtggccaactttggattccagaaactaagacctggagacttaacgaacgtcactacggtgctttacaaggtttgaacaagaaggctactgctgaaaagtacggcgatgaacaagttcacatttggcgtcgttcatacgatgttttgccaccagctattgatgatgacaacgaattcagtcaagcacatgaccgtcgttacgcaaacttggacccacacatcgttcctaaggctgaaaacttacacgtatgtcttgatcgtgtaatgccattctgggaagaccacattgctccagatttacttgacggcaagaacgtaattatcgcagctcacggtaactcacttcgtgctttgactaagtacatcgaaaacatttctgatgaagacattatgaacttggaaatgaagaccggtgaaccagttgtttacacattcgacgaaaacttggatgttgttaacaaggaaaagttggacgactaatttattaagtagttattcacacaaatagaacttcggcgtaagtcggagtttttttatacaccaaaaaaggcatcaccgttaagggatgccttctttgtatcaacttgctccaaaaactataattatttctttgatttcataatttttttggaacaacttcattatattataaataaagaaagatcgccatttttttctaagaaagtggtgaaaattgacagttgtatatgataagtgctattttgagttacaggagtgtagaaattgggagaaaaatatgcaaacaatcgataattctctctttcaagtctctgtcgatgagaatggggcccggatggcacatctggtgtctttaacagatcaatttgattatctcggcgagcaagaaagtgaagaaggtatggcacttgcttttccagtaatggatcaagccgataatttggctaacaagttgccttggaccgttgttgacaaaggtgatactcgcgtaagtctaactttaattgatacgccggagagctataagagttttccatatcattttgaagtaatgactacttatgctttggagggtaatcaagtcaacatatccttttatttgaaaaattcttcaaataaggaactgccattttctttgggctttatcttaccaacttcttggcaaagtgaaagccgggtcaataagattagtttgactggcaaagaacatggcattgatcttacttcaactgattttaagttgagtgcaaaagaaggaagcgttacagcttttacggataaaattgaattagaggcaaaaagtagccgtaattttgcgttaagcttgactttgaagtaaaaattagtaacgattttaataagatatactaagcaagtcagcgatgatttgctttttttgttataatacattcaatgtgaatttacatcataataggtatattttatgaaagatagaaaccaaagatctaatcacccgcataatagtcgggtagacacacacagttataaaaatcgtcatatttgggtctgggttattagtatcgtagccttgcttgcggttgctggagcggcgtactttgcctcagtttatttccgtactaagtcagcggttgataagacctatgatcctaagactgcagtgaaaactacaggtgaatttgatggaaagaagaagttcgctgttttactgatggggactgatacaggtgcccttgatcgaactgaaaagcgcggccggactgataccatgattttagctgtagttaaccctgctaagaagcgttacacattggtctcaataccgcgtgatacgatggcacagatggttggaagcgagagcttcaagacagaaaagattaacgccgcttatgaattaggcggggctaggatgtcaatggattcagtttctaagttaatcaatgtgccaatcaagtattatgccgtggttaacatgggtggaatcatgaagatgattcgctatgttggcggaattaatattagaccaacgcttagctttgaatatggcggttatatttttaaaaagggcaagctgacccatatgggtggtgcaggtgcgctagcatattctagaatgcgttatgatgatccacgtggagattatggtcgtcaagaacgacaacgacaggtaattaccactttgatcaagaaggcagtttcaattagttcattatcaaatctggattcaattttgacttctgtgtcaagcaatgttcggactaacttgccatttagtgcgatgcaacagattgcgatgaattatcgtagttgtgccaattcgtcatctagtgattatctacatggttacaatgcaatgatcgacgatgcggcttatcaagtacagccaactagtgaattgcaacggatttctaacctggtgcgcaaagaattagggttacctaaggaaacggtttcaaataatgaaactttccaaaacgaaaagaatattgcaaatggctttagctttaagagcgaaaaaacgcagcactatcatatctatgattacaccgaagaaggtgataattaatggcgcgcatttgggctactctgattggctacgtttttggaaatttcttaacggcgatgatcgttggcaaaatctttttaaaaataaatcctactgaatacggttcacataatccaggaacggctaacatgggtgctgtttttggtaaaaaatggggtattttaacctgtttaggcgatttgcttaaaagtttaattgccttgtttattgtatattttgcttttccagctcatattaatattgcttatacagggctaggcctgatcttaggacattgttttccaatctgggatcattttcgaggtggcaaaggagttgcggttgcagctcaggtagcagttttttataattggaaagctggctttgctactttattagtggctttggtattaacagcaattatgcaaaatttgacgattccgcctttagtgtttatgcttttattcagtataaatacattcttgcataatcaagaagcaggatttgtttttatcgtgattactttgatcatgtgctttaagttctggcatgatatcgtagactttttcaccggtcatggcaaaaaggttgatattctgctttcaattaaaaagaagctagggatcattaagtaatgacagaaatttttagtgaggacacagactagagaaaatgagtgagattaacaagaaaaaattactaaatgctcttcaaatcatttgtttgattgtcgcagcatttttcatgctagtgcagatgtattcttggggtagcacttttggtagattaccattaagtaccctaatgagatttattccaggactacttggtcacagtacgatggtactagtaccaatggtctttggtgctgtttatagcaaaagaaaagttcatccaactgaagcctttaagttttggattatagcggttgttacactagtgcttttatacttggtgaacttctttaaacgaccaggtacctttaatatgtggaagctctggggagtatttttcccagttttgactagtacatcagtattgttggctggcttgatttttagtatgctagttcaaccatacttgtatgaattacaacatcgcattactactaagcaaaatgtattattgcttagcacattaactttgactggttttgcgactagtgcaggtacaatgatctttaacaagtcaatttatggcatttatttgatcttgtactttgcttggggaatgtttttagctaacgttaaaattcctaaaaaggtctttggctggtcaattgcagctggagtaatgtctttcttcgtaatgtttatcggtgttcccggatttaatggggtttactggtaccaacgattatctggtcgaagtggcgtttattcttggaatcctaaatttttaagtaatattgcttcaccatttttgttcttaatagttttagcagccttcttaatctttagaaaagtgattgttagctatagtgctaagcagatgcacttctttattccagtaattatttttatggacgctccaattattggtggttttgttaaatcgttccgctttaccaatagcgctggatttaacaagttcttgatgattgtcatcatgatgctagctgcctggggcttaagctggctatatgagcgctatttattcaaggtgaagccggttaaacggacggttgcttttttcaagcaacataataacttagcagaaattgttgaagatgcttggactaacttcactgcttggatagttgaaaatcgagtacgactacttacatggggctggttctatgtattaagttttgcttcattcttaattgaatcagataatctgcggatccaaattacgactgcaactgatatcaatgccgtaattttcttgctcgggactagattcttcgctattattttgacagcaatcttccttgatgcaatgtttgcaattttctacttcattactacgcgttactggacttcaacagttttagtaactgtaattacaattggttgggctattgccaacaagattaaattagatcttcgtggggaaccaatttatccaactgaattagacgaaattgttaactggaagaccttgatgccaatggtcggccaacaaaagataattatgatcgctattgccttagtaattatcattgcattgactgtctttcttgaaattaagtttccaattaagaaaaagggctcatggaaacgccgtggtatttgggcattgttgagtttgcttttgttcatgacaccagtgcgctttaaccacgatggcggaattatttatcacattaaccgtggctttgataataagcaatcgtttagaaaccctgaacgtgatattcaaattaacggtccattattgaacttcttgaattactttgacttgcagattatgaataagccaactaactattcaaaatctacaattcaacatttgaatgagaagtacagcaagatcgctaatgaaattaacaaaacaagaaagaatactctaaagaatcaaactattgtttacaacttgagtgaaagttttgttgatccatatactttcccaacaattaagattgatccaaaaactccaaacccagttaagtttatccaatcaatgaagaaacgtgccacatacggtagcatgcttagtgccggttacggtggtggtactgccaacatggaatgggaaactttgaccggattcaacatgggtatgttcaagtcaactttgactccatatgtacaaatcgtaccaaactacgacttctacccaaccattggtatggacttcaactacaagtcagctgttcacccattcattggtacttactactcaagagtagaagactacaagagatttaagtttaacaagttcgtttaccttggttctaaatacaagatcattgatcaaaagaaacttggtaagagtacttacaactctgacttcactgcttatgctaacggtttgagacaaatcaacagcatgaagggtggtcaatttattaacttgatctcaattcaaaaccacatgccttacaacaactggtatccaaacaatgaatacatgggcaaggtatctggtgaactcttcaacactgccgctgttcgtgagcaaatggcaacttacatcaagggtacgcaatacaccaaccaagctgttaagaagtttattggtcaaattgataagatcaagaagccaattaccattgtcttctacggtgaccactacccaagtatcttgtcacaaaactacactggcaaatatcctgttcaaatgcactcaactcgctacttcatttactcaaacaagtacgcaagacaacacggtgctaagaacaagttgactcacaacactaacttcgtcaacactagtgacttcactgctatgatgcttgaacaaactaacactaaggtaactccttaccaagcacttttgactgaagttcacgagaagcttcctgcaattaccattaactttaatggtgacaaaggcttccaattggttgaccaaaagggtcactttgtagatcctaagaagttgacttcagaacaacaagctatattgaacgattacgaaatggttcaatatgatatgaccgctggtcaagcttatggcctaaaagctaagggcttttacaagatcggtgactaaataaaagagatcgaacgtaaagttcggtcttttttgtatccaatgataaaataagggctaagaggaataactgataattagctgatttaaaggtgattagaatgaaaaagataataacaatggcactagccagtgctgcactatttggatcttctgcaacaactgttcaagctgggacatataatcctaagaacattaccagttttaatattaataggcgtaactatgtagctaagggaaagatttataaactccatttacccgcagctggtagattagttactaatggcaatgttactttaaaaaatagtatggaatggacctgtattccttatggtaaggacaaaaatacatattatctgcgtaaaggcacatattatttaactagttcaaagaatattagtgtgaagactacttatactcgtttaactaagatccgtaagaatttagaaacttacgttgaaacaaagaagaataatgacaacagtagtcttaaagctagaaagattgaaattggtcaagatattaaagcaatgggtgaagtgtacgattacgatagtgtcgactactacacatttactattgactcacctcaaatggttacgatgaggatgaccaataatccgatttatcagcttggaaaaggtaacattttcagcaagatgaatgtaatcatgttcagtgaaaataatccagttggcggtagtacgatgctttacccagagagtttcgaaattaatggcaataagattgctagtcaaagctggtacttgtctaaaggaaattatacttttagtgtaaatactcgtggactttataattttcaattaacggctgttcctgatacgcgtgtggtaccggcagatactgagatagaatctttacaaaacactaaggatggtgtggttgctaacttaagggatgcacgtcatgcgaagacttatgaacttgcatggcgtgaaaaaggctcaaaggcagctccattcacttctagtagcaatactacagaagtaagtactgcacctgctacacgttacatagacaaaaatgatcgtaaaatcccagtttcaattggtaaaaaattagttaatggtcaaagctactattttgtagctcgcggtgtaagcaatcctgattacattcgttacggcaatccggaaaaagataattattttggtgcttggagtaattcagtagaacacacttactatgcaccttcagatgcaacaccaggtgcagttgatttaaccactgctaaagctgacagtacttatcacaacattcatgtggcttggaataaaattgctagtgcacaaagttatcgcattgcctaccgccaaaaaggtacaaataagtggtactatgaagtaactgatcaggctactaacgcgattactggtattactagaaatagaaattatgaagtgaaattgcaagcattgaatggtgaaaaaactggtccatggtccgcaattaaaacaatttttgtaaaatagcggttgactaaaactatttttctcgttaatatcataactaacaaatgagtagcgagtcggctcagcgttcagagaactagcggttggtgtgagctagacaggccgatttcagcgaagtacttaatagggttgctcctttaccggcttgaataaggcgcagcagcgcaaacgtgggtggtaccacggctaataatgtaatttagtcgtcccttggtcttttgaccaggggacgttttttattggaggaaaaactatggcaaaatttgatattttggaagatttaaaatggcgtggtgccattaatcaagaaactgatgaggaaggtttgagaaagtacttagcagaacatgacgatttggcattgtactgtggtactgacccaactggtgattcccttcatattggacaccttattccattcatgatcttgaagagattccaaatggcgggctaccatccagtaattttaattggtggtggtactggtgcgattggtgacccatcaggccgtaagactgaacgtactttacaaactgcggaacaagttaagcacaatgaagaaagcttaactaatcaaatgaagaagttatttggtactgaaaattttgaaattagaaacaatgctgaatggctaagcaagcttaacttgatcgacttcttgcgtgattatggcaagttcttccaagttaacaatatgattaacaaggatgttgtagctagccgtcttgaaaatggtatttcatttactgaatttacttatcaaattttgcaagcaattgacttctaccacttgaataaagatgatggtgttcaacttcaaattggtggtagtgatcaatggggcaacattactgctggtattgatttaatccataagcttgaaggcgcggatcgtccagcctttggtttaactattccattgatgcttaaggctgatggtactaagtttggtaaatctgctggtggtgctgtttggcttgatccagaaaagactagtccttatgaattttaccaattctggattaatcaagatgaccgtgatgtggttaaatacttgaagtacttcactttccttagccgtgaagaaatcgaagatttagctgaaaagactgagaaagaaccttggaaacgtgctgcacaaaagaagctggctgaagaagttaccaagtttgttcatggcgaagcaggtcttgaagaagctaaaatgattactgatgccttgttctcgggcaatatcaagaacttatcagttgctcaaattgaacaaggcttgaagaatgctccaagtgcggaagctggcaatgaaaagaagaatattgttgatttcttagttgacactaagattgaaccttctaaacgtcaagctcgtgaagatgtaaagaatggtgccatttatgttaatggcgatcgtgagcaaagtactgatttcgaagttgatccatcaagtgactttgatggtaagtacgttattattcgtaaaggaaagagaaagtatactttagttacaattaaataattaaatatatgattttaacattttatatataaaaatagagggattttttcctctatttttttagctaataatcggagatatttactaccaactaatatttgtaaaagataatgatttgtgtaaaataatattttacttcttaaattgttattttattttctaaaatcaattgctacaatctatttattaagttattcacaaattcacattattactatacgatttgctgcttcaagtgcaataccaacataaaatagctgcgtataccttttgcaaatgctgatgcaaagcacttgattaaaaaactgacttttaataaaaatatgtgaaaagcagcactatctactttacttataatcaaacagtgttatagtaatagtgtaaagagaaagtaagtaaatagaaagaggttattaaaatgttagaatctaaaaaagctattaagattatttcaagtttggtaatcggtttgagtttaggctgtgttcttactcctattgctcaagctacttcatttactgctcctaaattgggtactgcaacacaagctccaaccaatcctgctattaaaaagggtgataagatctttgttgttattaaagacaccaaaaatcaaaaagtagctgtttacaataaaaatgctgaaaaaactagcaaaaaagttgcaatgggttctacttataccgcaaaagacgttaagaaggttaataaaaagaagattgtcagaatcaacaagagtcaatggttgaatattaaagacgtcgttaagaactaaataaaagcaaatttaataaccgttttgaatacttattttctaaaaatacttggagagaataaataaggacgaggatgttcaaatgaatgtcttcgccttttttggtacaatgaagacgccgctttagctcaataggtagagcaccgccgtggtaaggaggaggtccccagttcaaacctgggaagcggcttagttgttgtttttggcaagaaaggaaaaattttatgaagcatgaacttacaatgaatgaaattgctaaatttcaaaaagaatatgagcaaaaaccgcaaaatcgggttgcggaattggctgttgttaataatggtgtggctaaggctagtttggattcagaaaaggttaggaaattgaaccgcactttttcaattgaaatcccaactgataatgttactgatcaaaagcaatcgggtcgctgctggctatttgcggccttgaatacattgcgtcatggttttgctaagaagtataatgctaaaaactttactttttcacaaaattatttattcttctgggatcgaattgaacgagcaaatattttctttgataatattttgaataccgcagatcgtccacttagtgacagaacagtgcatacttatatgcagggacctgatactgatggtggccaatgggctatggctgtttctttgattaggaagtacggcttagtgccaacctatgctcaagatgaaagtttcactgccaacaatactgctttcttcaatcgtattttgaataataagttgcgagaagatggacttgtgttgcgtaagttagctcaagcaggtaaaaatgatgaaattgaagctaaacgtcaagaatttttgagtgaggtttaccgtatggcagtaattgctttcggtcaaccagtacaaaaatttgaccttgagtttaaggatgatgaaggtaagtatcattttgatggtgatcttactccacttgatttctttcacgactactttactgatgacttggatgactatattgttttgttcaatgcaccagatcatgaatttgataagctgtatgctttgccatttgaagacaatgtagagggcggaagtccagttcatttcttaaacactaaaattgaaaatcttaaagaagctgcgattaagcaacttgaagcaggcgaaactttttggtttggttgtgatgtaggtaaagatagcgatcgtcaaaagggaattttagctcataacctctatcaaactgatgctatttttaatattgaaactaagttaagcaaaaaagagagactggaaactggtgcttcgggttcaactcatgccatgacgatggttggtgtggatgttgttaatggaaagccacgtcaatggaaaattgaaaactcatggggaaacaaggtcggtgaaaaaggctactttgtgatggatgataactggtttgatgaatatctcttcaaagtagttgttaaaaaacaatatgtaccggaaaaactggttaagatttgggaaggcaaagcaacgccggtaaaagcatgggactcaatggcataatggaaattaaacaagttatcgattttactcaaacacacttaaagaatgaaaaaacgggtcatgatttttatcatggcgaacgtgtagctaatttggctagtcaaatgtatttagcagatcatgctgatgctcatgaagatagccgggtagttgctattattaaaacagcgggttatttgcatgacacgattgatgaaaaaatatgtgctgacccacaaaaggtaattgatgaaattaaagttttattgccgcaagtagggtttaatgaactggaggcatgggatattttattcaccattcaacacatgtcattttcagctaatattgagcatcactatcatttgcctttatctggacaatatgtgcaagatgctgatcgtctagaaagtttgggtgcgattggaattgcccgtgcctttacgtatggtggtaaacatggcaataagatttacgatccagagattaagccagccgttttaactagtcatgatcaatatcgtaaccatgtcgaaaccacaatcaaccacttttatgagaaactttttcatttagaagatttaatgaatactcctgctgccaaaaaagaagcggaaagacgaactgcatacatgcgcgactttgtacgtgaatttatgcaagaatggaatgtttagaataatttaattttgaataagccttgatacatcagcattgaggcttattttttaaataaattaaaaataatattaaaaaaaacttgcaaagcaaaaaatatttagctatacttataaacaacttaaagagttctattaattttctcataaacgaggggagcaataatatgaagtttaccaagttattcgctgcaggagcaaccgttttgattgctggctcaacattagcagcatgtggtagtaattctaattcgtcaagttcatcagctaagaaaacaattaattggatggattcggctgaaattccaacgatggacatttctaaggcaacagacgttaccagttttaaccaattgggtaacgttgaagaaggtttataccgtttaggtaagaattctaaagttgagaatgctttggcaacagataccaaggtgtcaaaagatggtaagacctggactttcaccttgcgtgattctaagtggtctaatggtgataagttaacggctaaagactttgtttactcatggcgcagaaccgttaatccaaagacggcttcacaatatgcttacctcttcgaaggaattcataatgccactcagatttctgcaggtaaggcaccagttaatagtttgggagtaaaggctgaaggtgataataagttagttgttaccttagacaaacgaattccatactttaaattattgatgggattcccattgttcttcccacaaaaccaaaaggtggttgaagctaatggctctaagtatggtacttcatctaagactacagccttcaacggaccttttgtacaaaagggctggactggttctaacctttcttggaagcttgtgaaaaacaagaattactgggacaagaagaatgttaagcttgatgctattaattacagcgtgcaaaagacaccatcaacagcttacaacttgtaccaatcaaataagcttgatgctactattttagattcacaacaaactaagaacttaaaacatcaaaagggttacactttgcgtgatactgcagcaaccttctatttgcaatttaaccaaaagaagaagattttccaaaatgctgacttgcgtagagcaatctcaatgtcaatcaatagaaaggcactgggaagtgctttaggtggtgctaataccccagcaaccagtttaacttcaaagggtgtagttaaccatgatggtaaggactggtcagaagttgttggtgataagaagaacgccgcatataacccaactgaagctaagaaactttacaagaaggctttgaaggaattaggcgttaagaacgtttcatttacaatcctgtctgatgatactgattcaggtcaaaagacgactgaaacacttcaaagtcaattagaagaaaacttgaagggtatgaaggtttcagtagctaacgtaccattcaagactcgtttgaaccgttcaactagtggtaacttcgatgttgttgtttcaggttggtcagctgactttgccgatccaatttcattcgttgacttgtttactagcaagaatgcacaaaataacggtaagtggagtaactcccaatacgacaagttgatcgctgattctaagactacagcagatacaactaagcgttgggatgaccttgaaaaagcagaaaagatcttgcttagcgatgaaggaatcgccccactttactacaagactgaagcttggttagttcgtccagacattaagggcattgtctacaatggcgctggcttaaactacaacttcaagaatacttatgtagcaaattaattaaaaaatcaggaggacatagtaatgattattatttcagcaattattattttacaaacaagacataaaaataatctctcttcacttgtaattgcgtaataatagtctagctatgatttgatgaatagatagaaggagcacccatgtgaaggtcaatgtcattaagttaagacattgactaatctgatgacactttttgagacatttatcgaattattttattcgataaatgtcttttttgatagcacaaataagccatcttaagatagtcgtttaaattagttcaagctgctagacgataaggaaagccaactactaatttaacttttagatttcgtttatcttttcttcctggtcgaataggcgttaaataaaatgccacatccagcagtaattgtgtgaagtttttatctgaattatcacttatactaaaatatcgtcgccagatacaacaggccattttaaaatctatttgatattgatattttccctgagtatacggttttgagctcgcaattattgataaactcacggcattatacattgcaaaatgggcgtatatttccatataaacaaattgatcttttttagaatgaaactgtatgccgcttaagtcatatttaagctccctaaaagaagtttctattccccagcgaagatgatagatctctttcattctagctagaggatattcatttcgatctaaattggtgatgaggacttcccactcatcgtctgaacctggtggattgattctaaacttacaaactctaaatctaacatcacacatatcctcaaaatcccagcgttgatctctggtattttttgaacgaacagctttatagtgatgctttttgtgaagaatcaggtgaagaaacttttctgtatctttatgggtgacataataataatgtgacgaagttactctgcatgataagtcaatatcgtattcatgattcgacatagctacaatttctttaaaagcaccatctccggattttgatcgcataacatagtggcaatgttttaatcgattgcaattttcaattaaattaaagctaatatagccacgatccatcaggactaagaaatctttttcttgttgggctaatttctttaacatagttaaggctgcctcacgttcatccattttttgtctgggttggataaccatgtctaaatataatttattcaagacatcataaagagcatttacatgaagttgacagtatattcgaccatctttacctcgaaaaatattttctgattcgggattaaaaggttgatcaaaatcagagccatcaatcgcaacaactaagtattgattatctaataattgcagtacattatttgcccggctaagttctaacataatttctttaaagcattcaggctttaatttagccttttgttgttcaaaagccgaagcagtcattctagaatttatgtcaggaaaagcatgaaaaatttccgaattcaggctgccagctcccatgttaagaattaacttaatcaaatcagtggaattgagcttacgacagcgagtaaaagcttgatcagatacagagaaatcgtgaatgttgtcagcgattttattgataatactatccatcagctttaaaatatttgagtgaagggatttcataagaggcacagctttctatgaaagaccagataatatgacgaaagtgagcagaaaggcaaataaactctgctcactttttattttaaaaagaaaaaagaccgaatcaaaatgattcgatctttaaaagctgtcgatataatgtcaatgtcttaacttaatgacattgatgtgaaggttgctcctttttgtaataaaaaagaatgagggtcaaaatgaaaaagtggaaaaagtattttagtgcaagtttattaaccgtcgtatcagctgcaactttggcagcctgttcaaataaaagttcgtcatctggtaccaagcaaaccttgaattggatgactaaatcagaattacaaactttagatttgtccaaggtgactgatgcaactagtttagatcaaattaataattcgatggaaggactctatcgtttaggtaaaaattccaaggtggaaaatgctttggcaactaagactgaggtatcaaaggatggtaaagtgtggcattttactttgagaaagaatgccaaatggtctaatggtgatccagttactgctaaagatttcgtctattcatggcgtaggactgttgatccaaagactgcctcacaatatgcttatcttttctcaggagtaaagaatgcggatgatgtagtagcaggaaagaagaaggttgaaacactcggtgttaaagcagatgataaccaacatttaaccgttactttggatagaagaattccatactttaagctattgatgggcttcggggttttcttccctcaaaatgaacatgccgttgaaaagtatggcaaaaattatggtacctcatctaaaacaatagtttataacggaccatttgtatcaaaaggctggaccggttcaaacttgtcttggaagctagttaaaaataaagattactgggacaaaggcaaggtaaaactaagtaagattaattacagcgtgcaaaagacaccatcaactgactataacttgtatcaatctggaaaattagatgtagcattattggcaccacaagctacaaaacaattgaagaaccagagtggttatacaattagaccagcttcttcaacacaatatttacaattaaacgaaaagaacaagcttttccaaaatactgacttccgccgtgcactttcattatcggttaatcgtaaggcattagcttcagctgtaggtggtgctaacaagccagtcactaccttttcaccaaatagtatgactgaagtaaatggcaaagattatactgaattagtcaaaactgctgaaactgataagttaatgacatataaccctactttagctaaaagttattggaagaaagcacaaaaggctttaggacagagcaaagttaacttcactttgctaacctatgacgatgatgatgccaaaaaagcaggtgaatacttgcaaagtactattgagtcaaacttgaaaggcgttaatgtcagagtaaatagtttacctaaaaagactgccttagttcgtggtcaaaatggtaactttgatgctttactgatgggttggcaagctgactttactgatccaatctcattccttgacttgaacacctcaaatgcttcatacaactggggcaagtgggctaataaggaatatgataagtatgtagcagcttctaaaactactggaaacgaaaatactcgttttgaagacttagctaaggctgaacgtgtattgttaactgagcaaggtgtagtaccactttaccagccagcagaagcttggatggttcgtccaactgtcaagggcgttgtatataatggtgctggagctaactataacttcaaatatgcttatgttgaaaagtagactaaaatcctaaatatctaaataatagaacttataacaataaacaactcctctatgtaattaaaaagcagaccgaaaaaatcggtctgctttttgattttcgcttgaaaaaagcaagttaggctagtaaagtaaaactaataattttttgaatgagaaaaggagagcttaaatgtcaaattgggatacaaaattcgctaaaaaaggtttaacgtttgatgatgttttattaattccagcagaaagtcatgttttgccaaacgaagttgatttgagtacgactttggcggataacattaaattaaatattccattgatcagtgcaggaatggatactgtaactgaaggtgcaatggcaattgcaatggctctccaaggtgggctaggcgttgtgcacaagaatatgtcaattcaagcgcaagctggtgaagtagccaacgtaaagagcgtagttgtgccaactagtgctgcaaaggccgcaactgatgatcaaaaccatctgctctgtgctgcagcagttggtgtaaccagtgatacttttgaaagagcagaagcattgcttgaagctggtgctgatgcgatcgttatcgatactgctcatggtcactcagctggggtattgcgcaagatcaaagaaatccgcgatcattttccagaagcaactttgattgctggtaatgttgcgactggggatgcaactagagcactgtttgatgctggtgttgatgtcgtcaaagttggtattggccctggatcaatttgtactactagagttgttgctggtgttggtgtgccacaaatcacggctatttatgatgctgctacagctgcacgtgaatatcacaagccaatcattgcagatggtggaattaaatattcaggtgatgttgttaaagctttagcagcgggtggcaatgctgtcatgcttggctcaatgctatcaggtactactgaagcacctggcgaaatttttgaagataatggcaagaagtataagcgctatcgcggaatggggtctgttggtgcgatggcccaagcacacggttcaagtgaccgttacttccaaggtggcgtaaacgaagctaataaacttgttccagaaggtgttgaagctcgagtagaatataagggcgatgtttctgatgtagtctttcaaattgatggtggtctccgttcaggtatgggatattgtggtgctgcaaatattccggaattaattgataaagctcaatttgttcaaatcactaatgcaggtttacgtgaatcacatccacatgatgttcaaatgaccaaagctgctccaaactatacaaaatagatataataaaagttaaaaataagagagaaagcaaaatttctctcttatttttttaattttttggacattttaactagatatatttatttcttttggtataattaaaacaacattaaaaagtaaatgaaagcataaaataaaatgagggagcaattaatatggctagatacctattaaaacgtatattttatatgatcctcactttgcttatcgtggctacggtaacttttttcttaatgaaattgatgccgggttcaccttatgctaatgaagcaaagatgacgctaactcagcggcaaattatggatcaacagtatggtttaaataaacctatctggcaacaatatttgatttatattgcggggatgcttcacggtgattttgggacatccttccaatatagtaaccaaccggtagcttcattaattggggcgcgtttgggtgcgtcagtacaattaggtttacaagcattaattttgggagttgtccttggtgtaatcgctggggcaattgctgctatgagacagggtacttgggttgactcaactgctactgtaatttctattttgggtaaatcagttcctaactttgttttagcagttttgcttcaatactacatcggtttaaagctaggttggttcccaattgctggttgggggcaattttctcaaacgattatgccaacgattgctttggcagttggaccatttgcggaaacagctcggtttatccgaaccagtatggttgataccttaagtagtgactatattgagttaggtaaggccaagggcttaagtagaatggaagtcattagaaaacatgcaatgcgtaattcaatgattccattagtaactctgattggtccttatgctgtagccttgatgactggttcaatggttattgaaaatatctttaacgttcctgggattggtgaacaatttgttaagtcgattttgactaacgactatccaacaatcatgggaattacgatggtttactgtattggattagtagtaattctgttgattactgatattgtttatggattaattgatccaagaattagattagatgaaagcgaggcctagaagacaatatgactgaagaaaaattaaaccttcctgcagatgcctttgaacccttatcaaaagatgaagcacaggataacgaaaacattgcaggtccatctttatcgtttgcacaaaatgtttggcttcgcttcaagcagagaaaagcagctattatttctgcaattattgttattttgatgattgtagtagcttttggttcaaccccattcatcaataaatctactttagttaaatcgcacccacaatatgccaatttacctgctaaagtgccaggaatgagcgcaattaacgggttgaacggtaagattaagcaaaatggcaagtgggttgatgcttatgcccagaatggcgtgcctaaagataagtattttatcgcaggtacagattatttaggcagatctttgggacaaagaattatctatggtacaaagatttcattgatcgtcgctttagttgcagctttctttgatttaactatcggagtcgcgtacggaatagtgtccggctggaaaggcgggggagtcgataacgtaatgcagcgaattatcgaaattatctcttccgtgcctaatttaatcattgtagttttgatgttggtggtattaaaaccaggtattaagtcaattatcttggcaattgctatttcaagttggacgacaatggcacggcaagttagagcagaaactctgagtttgaaaaatgaagaatatgttttggcagctagatcattaggtgaatcaccttggaaaattgcttggaaacacttagtgccaaacctttcaagcatcatcattattcaaacgatgtatactattccaactgccatcttcttcgaagccttcttaagtttcatcggaatcggtatttcagccccagaaacttcactaggtgtacttttgaacgaaggacaaaagaattttcaattcttgccatatcagatgtggtatccagcaatcgtattgtgtgtgttgatgattgcctttaacttattaggtgatggtttgcgtgatgccttcgatccacggggacaaagatagaaaggattaacctaaatgccagaagaaagagttttagatgttaaaaatttaaaaattgatttccacacttatgctggtgaggttaaagctattcgtaacgtttcctttcacctaaataagggagagacgctcgcaattgtaggagaatcaggttcaggtaagtcggttactaccagaagtattatcggtctgttagcacgaaatgctcagattgaagacggtgagattgatttccacggcaaaaatttgctagagttatctgaaaaagaaatgcaaaaaattcgtggtaacgaaatttcgatgattttccaggatccaatgacttcgcttgacccaactatgaagattgggcagcaaattgcggagccattaatcaaacataagggtgcctctaagaaagaagcttgggctaaagccttggaaatgatgaaggccgtgggaatcccaaatgcagaagaacgaattaatcaatatcctcaccagttttcaggtgggatgagacaaagaatcgtaattgcgattgctttaatttgtgagccagagattttgctggctgatgaaccaactacagctctagacgtgactgtccaagctgaaatcttggacttgatgaaagacttgcaaaagcgggttaagacctcaattattttcattacgcacgacttgggcgtggtggccggtatggcagatagagtagctgtaatgtacgctggtgaattcttagaattcggtggtgttgatgaaattttttatgatccacagcatccatatacttggggcttaatcaattcaatgcctactttaaacagtgatactttggagtcgattccaggtacgcctcctaacttgcttgatccgcccaagggtgatccttttgcaccaagaaataagtatgccatgaagattgatgtggaaagaaagccacgatttttcaaggtaactgatactcactatgctgcaacctggcttttagcaccaggtgcacctaaagtggaaccaccagctgaaattacacgtcgctggaaaaaatataacttgatgaaacaagaagataaactgccagaggttaactagtcgcggtaaaggagatttttatgccagaaaaaaagaaaattttggaagtaaaacatctaaaacaatactttaaaaatggtcgtaatgtcaccaaggctgttgacgatgtaagctttaatatctatgaaggtgaaactttcggcttggtaggtgaatctggttctggtaagacaactactgggcgctcaattttgcaattgtataagccaactagtggcgaagtgatttttgaaggcaaaaatgtagcagatttaaaaagtcgtgcagacaaactagcttttacacgggatgcacaaatgatctttcaagatccttatgcttcacttaatcctagaatgactgttgaggacattattgctgaaggattagatattcaccatttggttaaaaataaagatgaacgaactgagagagtagaggaattattggaaactgttggcttaaatgcaagtcatgctagccgttttccacatgaattctcaggtggtcagcgtcaaagaatcgggattgctcgcgccttagccgtagagcccaaatttattgttgcagacgaacctatttcagctctagacgtatcaattcaagctcaagtagttaacttgatgattgaattacagaaaaagcgtggtttaacttacttgttcattgcccacgatttatcaatggttaagtttatttctgaccgaattggtgtaatgcactacggtaaactactggaagtaggtccagccgatgacgtctatgatcgaccacttcatgattacacgaagagtttgatttctgcagtgccaattcctgatccagaagttgagcggagccggacaaggattccttatgacgctcaaaaagaagaaatggacggaaagcaacgctcaatgcatgaaattcgtccaggacacttcgtacgctgctctgacgatgaagtcaagcattacgaagaagtagcggcaagctacgaaaattagataccaaatctaatgcaactctctctatattaatattatatttatgctaaaaaggcgatccgatatggatcgcctttttatatgatcattgctcgttaagctaatgaatcccatgctggtaggtcagtgattggaccttcagcgagcttcttttggttttcagttaagtacttcttgtggactacaacttcgtaaacatagtccttaaaccattcattattcatgacgtagaagcctttaacaccagatttatcgccccatgagttctcaactttccattgacgaacttcgccgttgtcttcatcaacaccaactaaagtcatggcatgtgacacttgaccgacgccggtctttaatctgtctgctttagacattttaaggtcaacgccgaataagtcatctaacttgtacaaattagtgtcaaggtaaccagttttacggtccatttgacgtaaaacatcgttaccaaaccaaacagcttcgccgtcttttaattgagcgatagcagcgctggacaagtattccattggtacattcaaaagcttgattctcagtgagccttcaatgttgtcttcagctggtagaccataaagcttgttatagtcatggtctggagcattggttaaaacaacatagtcatcaaaatcaacgtcgcccatgtacttgtgtaaaaactcaagtggagttaggttcttttctaaatgatatttcttgtcgtcatcacgatattcaagatcgaaagtcttaggtggttcacctactgcgatagcagtcatttggtaaacttcgcttaaaaatttttcgcgaacctttttaatttcatcatctttgccgtattgcttcaagtggcgcaatactaaagcatccttctttaacttatcgcccaaagcagtagcaaaaccagttgtatcattggtgttaaaagtttctggcattgcatatgaaggaacaacaccatatttttcaactaaagcggcagccatttggaattgtccaccatcactaccagcaaagtctaagtcagccttaacttgacgtgaatcaagtggcatgtcagcactgtctaagattctgttgtagaacatgttagcacgttcgatcttatcccagaagaagttgtaagcttgtgagaaggtgaagtccttagccttatatttcttaccaaaagcgtggcgcaaaacgttcaaagtcgcaaacagccagcaacgaccagaatgtttttggttagtgacattatttgtatcaagttcagttgaaaagacgcgggttaattgtccttgaacacgatcattataagatgcttcaagtacaccactgcgttgagctgcacgagcaacgactttattttcaggttttttattaaattcggcagagaacttttctagttcctgcacagttaattcatgagccataaaaaatctccttttcattttataatttttttctcaatttaattctattttaaagcaaaacaaaagcgggttcaatcagaactcgcttgagagaattattaatccgtcaacttattagatttcttgcctatatctaataaattaatcaatttggatagaattgccatcattgccagcagtttcctttggcaaagtgatggtcaatacaccattatcatactttgcatgaatctcacttgcaactacatttggtaatctatagcttctagaaatactgccctcacttctttccttatgaatgatatttctatttttatcgctagtgtccttaaatgattttcttgtgccgctgacatttaacgtaccgtcattatagttaacgttgatatcctgcttatccatgccaggcatgtcaatcttaactagatagtccttatcagtttctgcaacatcagattgcataatgttttcaatttcattatcgtcaaagaagtttcttggaaaaccaaaccaatcattcattgcatccatcatgtcgttgcgccgattcatcatattgtttgccataaataaaacttcctttcatttttgtatttgcttaattagaatataaggaaaagatcaactcatttcttgatctcttttctccttacactgtttattgtagtcgctttttatagaaatgacacaaattagcactcaaaaatttatagtgctaattttagactgataacgctgctacaataacattctgagattgtagataattattacgtatagaaaaataaagaaagtttgtgaaatagaaatggtatattttcagaaaatgacaccagaaggctatcaacaaattgaggatgaaattgctcgattaaaaaaagatcggccacgtagaattaaaattttgcaggctgcacgagctttaggtgatctttcggaaaatactgaatatactgaagcaaaacgtgatctaggtcacttacaaagtcgtctgcgttacctaggcaaacaattaaagtatgccgaaattgttaaagctgaagatgatggtaaggttgatctaggaaagaccgttgtgcttaagtttgatgacgatgatgaaacagaagaatacaaagtagttgggcgaatggaagcggatcttgctgctggcaaggtttcttttgattctccattgggtcaagcaatcatgaaaaaggaggctggtacaacagcaacggtggctgcaccagcaggtgaatatcaagtaacgattgtggaagttaaataagttgagaactataataaactgtctttttctggtataatatgggttttgtaggatacaattcagagtaggagtgaagaatttgaatacgccacaatcaagagagggtaatgtgatccgctatgccgtttatttagctggctatgtcgctgtgtttgcagtagtaaagctagttactagaaaatctccggttcatatttgggatttgattttattcggcttagttgcagccatgattctgttgttttatgtttatcgtttcaatcgagagcaacgcttttttgcccgtgattttaaacttccatggttgggcagtttgtcaactgttgttctattaacattagtgattacagttacacagatttcgatttcatacttacaatcatatggcaggattagtcattatgatttccaattgatatatgccaaaagtgaatcagttaacatgttttggtttttaatcgttgtccaaggaattgtattaccaatcctacaagaatttttggcgactggctttttgttcaattatgcttttcggcgaaatactaagcaagttgcaattatggggatcattgtttcaggtctgatttatagcttactgagctttcaaaattcagtagtactgtttattattgatgcaatttatggcatggtgtttgcttggagctatatgtacacacaaacattattgatgccaatttacttagctgtagttagtggcgtacttacagtgattatgatttaaaaacaaaaggatgagaaaaattctcatccttatttttgtataaaaaaagcggatagcgtgaatcgaacccgcgtctacagcttgggaagctgtcgttctaccatttaactatacccgcaatatgtttttattttagcattttttctatttgaagatcaacacttttacgatcaattaagctggtaaaattttgaaaaagccagcggcgtagttcgttgggcataacaactagaggcattctattatggattggcgccatatctttgttaggcgcggtagtaaccattgaaaaataatcctgatcataaatacctgcaattaaggtaagtggttgattagtgcggaaggcgtagctatcatggtatttacgaccgttttcagcaatatgggtagttttagcatattcaaagaatttttcggttaagattaagcaacgttgcttggcaaaggatttgtcccacattgaaggcgctgaatcataaaatcgctcaattctagcgttaaataatggcttttttggatcaacgggacttggatagccccattttttgttgtttaattgcaattgaccattttgataaagcaaaacaggtgctacttggttaggaaaaatatcttgtgcttgaatgtcaaaatttggtgtaactaagggcaggtcaagatcgcttttgagatattgttgaatttgttttaaattaggtaaacgaaactggttgcacatacgcatttcctttctttagggctagtttaatcatagcctattttttgttaaaattaggtaattaaacaattaatattaataaaaaaataaacttaaaaattagaaaagagcaaaaagatggcgaaagaaattttattaactggtgaccgtcctactggtaagctgcacattggtcactatatcggttcattaaagaatagagtaaaattacaaaattcaggtaaatatgatccatatattatgattgcggatacacaggctttgaccgacaatgctcgtaatccggaaaaaattcgcaatagtttgatccaagtagctttagattacttagctgttggtattgatccagctaaatcaactatttatgttcaatcacaaattcctgctctatttgaattgactgcttactacatggatttagtaactgtggctcggcttgaaagaaatccaactgttaagacagaaattaagcaaaaagatttcaaagactctattccaattggctttttaaactatccagtttctcaagctgctgatatcaccgcttttaaagcaaccgttattcctgttggagatgaccaggaaccaatgttggaacaaacacgtgaaatcgttaggacttttaaccgtgtttataattgtgatgttttggttgaacctaaaggttatttcccacctaaaggtcaaggacgtttgccaggacttgatggtaatgcgaagatgtcgaagtcacttggcaatgcgatttatcttgctgatgatgcaaagacagttcaaaagaaagttatgtcaatgtacacggatcctaaccatattcacgttgaagaccctggtaaggttgaaggtaacactgtctttacatatcttgatgtcttcgatccagataaggacaaggtggcagaacttaaggcagaataccaaaagggtggcttaggtgacgttaagattaagcgttacttaaacaaggtccttgaagcagagcttgcaccaattcgtgaacgtcgcgaaaagtttgctcaagatgaagatgcggtttatgaaatgcttctggaaggttcaaaaaaggctaataaagtggctaatgcaacacttgaacaagtccgtgacgcaattggtttgaactatttcaagaatagataaggctgaggtaaagttatgcacgatcgaattccttggaaacaatattttatgatgcaggcgctagtaattgcgcaacgctctacttgtaatcgcgcattagttggtagcgtcttagtaaaaaataatcggattattggcactggttataatggttccgtttcaggacaaccgcattgtgacgatgtgggtcatcaaatggttgatggtcactgcgttagaactattcattcagaaatgaatgcgatcattcagtgtgctaagtttggtgtttctacagaaaatactgagatttatgtgacacattttccttgctataattgctgcaaatccttgttgcaggcaggcgtgaaaaaaattaactattattttgactatcgcgataatccattggcgatgcaactacttcatgatagcggggtgccttatgaacagattaagattaatcgcaaatacgtggaaagcttggcccataaacttgaagaagacgagaattaatttaatttggttaatgggactagtaactgtatttttaataacgacaggatttgtccagccaaatattgaagatcatgctcatattttagataaagaaactcgcactttgattacggaaaaaaataatcgctattttcagactaaagaacaaccgcaaattgtcgttataacggttaaaaggctgaataagttaacacctaagatgctagatcattctaagcgaacggtctttattgtggtaggacagaaaggtaaaaagcgtaatgtgcaaatttattcaactaaagatttgcatagtgccttcaccgaggtcgctcggggcaatatcttgcgtgctgaagtagataaattgcgtagtcaaaataatgcaacttttaacaagggaattcgcttcgtctttcgggcatgtgcgactagagttgatcaacaatatcaatatgcacttgataaatatgatttgacgcaagcagaacaaaataaagtcgcgcgtccacatagtgtagctttaccaatcgcactggcactggcatttttaattacgggaattacttatttcttgcgtagatttagtcatcgtgatccaatttctaagaaatagtcggcttgacttatttgcattttgtccttacactttttatagacataattagcgaaaaactgttaggtgagactcctacgtgaacacacgctatcgcccagaaacatccagagatgccaacgggttaaataggtgtcgtcgacttaaggcgagatccagatagctagcatgtgcttacgtcacgtagtgttaaaactgaacgacgagtatgacagagccttgtttggcaaaagtcacctgcagagttacaggtggcttttttgttttgcttgtcccaattaaagaagggagcaaataatgttaaaagcagctagcaagaagcgatcgaatattgatattcaaagtattcaacgtattgcacgtgaatcgcgtagcgaaacactagccagattgcaggcgagtgcggaagggctttctactaataaggccgaagaaaatagaagagaatacggtaagaatgagattattactaataccaatgcttctaaatggcgtttgctttgggaatcggttgcgacaccatttacggtagtgttattagtattaactttgctaacgctttttaccagttatattttgataccacaaggcaatagtgactcaatcacaattattgtgatggttattatgttaattgtgtcagtgctggttaattttattcaaaagattaagattgctagagtaacagatcagttgctcaatcgggtatcggttactacgaatattcggcgtgatggacacaatgtcgagctacccacagatgaagtagtgattggggatgtaattaatttatcggccggcgacatgattccagcggatatgaaattgctaactagcaaggacctcttttgttcatcaagttacttagatggtgaccctgaaccagctgaaaaagtagcgaatgtaataattaagccgagcatgagcaatgattatttaaactatcctaacatcttgtatgaagggacgacgattgtgtctggctctggaaccggaattgtttttgctatcggtaatcacaccgtttttggtaaagaagtccaagctatttcacgtaaaaaagtaaaaactacattgtttgatcgtgaaatgaaacaactagctaagatcttgattgtcgctactgcaattatcatcccactactgtttgtcattaatggcttgactaaaggcgattggggagaaagcttaatttttgctttagctgcggctgtcggcctgacaccagaggtgctgccgattattgttaactctaatttgactaaaggcgcagcagaagggatgctggctatttctaataaggttgaactcaacggcaaagttgaagatttaacttctgaatggaaagaaagaattttaaatcagatcaatgaattaaatgatgatggcttgcgagtcctgcttgtcggctataagcttaatcctgctccagtaggtgagttttctgccaaagatgagcatgatttgacgatcattggctatctagcatacttggatccgcctaaagagactaccaaggaagccttagaggatttaaagaacgataatgtcgacgtgaaaatttttactggtgataacgaagcagttacacgtgtgatcgcattgcaggtgggtttaaacgtcgatacggtttatgatggaaaacagatcgatgaagccagtcctgaagaattaaaagaaatcgtggaaaaatgtgatatttttgttcatttgacgccagaactgcgggtaaagattattaacgcattgaagaccaacggtcatactgtcggttatatgggcgatggcaataaagacgctttagcgatgaaagtggcggatgtgacggtaacttcgaatagctcggttgatatcactaaagaatctgctgatattgtatttgaacaaaaagatttgcagctgcttgaagaaatgatcatggtcggcagaaaagtcttttctaatacgatgaagtatattaaaacattcttggttaccaatatgggcagtattatcgcaatggctgtttcttccttactgttgccgtttttgccacttttaccattgcaggttctaattttaaatttgctttttagtctaagttgtttagttatcccctttgacagtgtttcagaaaattatgtcaaaaaaccgcaaaagtggtcaatcaggatgtggccaaaatttgtcttaaactttggtccaattccggcaattgttgactttattgcgatggctttaatgttttacgtaatttgtccttacttggttggctctaattaccaccactgggtcttcatttctttgttctattctggaatttttgtggaatctctgtggactagggtaatgattattcatactttaagagatgagcgttttccattctttaagcaacatgcaaccccaattgtctttttagtaacctttggtttggcaattttagggactatgttgccttcatctagtattgctccaagtttagggttaactcaattaccatttagttattgggctgtagtccttttgttagaagtaatttatattttattgacaactttggtaaaacatttatatttgaaaaaagaaaaattctaaattaaaaggatctaagcttgcttttcagctgatacattccctgtcaagtagacagtagaattacataaagcttttattcctcagttgattaataatcagctgaggattttttggcttctcttattttcttttcgtgtattttttgccagtatttctcaattcgatgatttggtgcaatagggcaattcttaatattgcctttcatcgcttctttgcgcatttcaccagcagttaaaccgttaaaacgtttctgtggatcttcattaatgtagtaatctattgtcttacaaatagaatcattaagttcatcataactggccacttgaggatgaagaataactcgcatttctttgataatgccttgccagccttccattggaccattatcaatacagcagccaacacgagacattgattgcgtcatgccttggtcttctaattggttttggaaaggtgcgcgagtaaattgaaaaccacgatcactatggaaaagcggatgagcattagggtatgctttaacagcctgcttataggctgcttgaactaaagcagtatcgtttcgtttactaattgcgtagccaacaggatagcgatcatatagatcaaacacagtacatagatatgccttaggcaggttagcagcaacgacttcagtgatatctgtacaccatttttcattaggtctagatgcattaaagtctctttttaacttgttttcggccgttttctcaggcgttgtatgcttgaactttagcttctggtatctaggcttttgtgatctaatgccattgatacacatcaagcggtaaacagttttatgataaaccggcttttcatcagacatctgtcgattaactgccatggtcatcttttccgtcccaaacagactgttgttagacttggttatttcaatgatctttgcttcaatctttttgtctcgttcttcacgcttactcggcttgcgcttaggatcaaagtatttgtaataagctgagcgtgctattttagcccatttgcacattaaatcaatcttccaattgtacttttgatggcagtcatggattaactgatatgtttcttgtttccagcgtctttttattgcggcttgtctgtatcttggttgtccggcaagcacatcctttctaactgatctaatttttttaggaattcgttcttagtttgttcttctttgagctgacgctctaattccttaatttttcgattagccagttctaactcagttagctcttctggcttcttatgtctgcctcgtttatctgttaatcctgtttcaccattagctagatatttgtgtgtccagctgtaaacctgctggtaagaacaatcaaatttgacagctgtttgagtgtaattcttgtcgtgattaagacagtattgaacaatctgaattctttcttgctgggtagtttttcttcttgctttagtcatatagacctccggatggggatcatagtcccgattttctatatgactattatacttggaaacccattctgatactgttccattgcttctaatgccatatttattagctaaagaaggtaacgacattttgccagctaaatattcttgaacaaccttttctttaaatgccttagagtaatgattattgtattgagcattacttagaagggtatcacgattgctttgatattgatgaacccatcttcttacttgcatcgctccacttttacttggcatcttaagccgtttagctatttcaacgctgctcctattaccattcaagtattgttcaactgcccatatcttttgatcgaatgaatatttactttttctggacataaaaaatcccacctccatggataattgaatactttatgtatttaaatcgtccactttagtgggattgtatcaagcttagatcctttttgtataatgattttaatgaaatactataaaattatttacaattagtagttacagtacatccatcagtagaaatagtgtcattgttagtaggaacttgtttcctagctaacttttgtaaattaattaattctttcatgagattatacctccataaaacgagactgtaaaatagtttgtgtaaggatgaatgattccttaaatttatttctttaaacattagaaaaaggagttcctttctcgtatgattggtttgaacaaaaaaacacatacagaaagaagaactccttcatgaatgattttaccaaagattttgctcaagctctattcaatccagacaaaataaatgatttattgcgcaaagagctacaacaggctgttaataacttgttagaagctgaattgactgcctttctgggctatgatccctatgccagaaatggctggaatactggcaactctagaaatggtgcttatttccgcaaagttgatacgcaattttgcccaattgaagtgcaagtgcctcgggatcgcaacggtcaatttcatcagcacacgctgcctggctacaagcagcactcggatatcttggaaagcatgattatcaagctttactccaagggcgtgaccaccagggaaatagccgatctaattgaaaagatgtatggcagccattacagtccagctcaggtatcaaatatttccaagcagatgattccaaaggttgaggcttaccacaaacgcaagctaagcgacaagtttttctgcgtctatttggatgcgacataccttcctttgcgccgagaaacatttgagcgtgaagcagtctatattgccattggcatcaagcctaatgggcacaaggaggtcattgactactgcattgcacctagcgagaacattgaagtctggacagatatgcttcaaaacatgaaatcccgaggcttaaagcaagttgagctttttctttctgatggtgttgttagcatgaaaacagccttggccaggacttatcctaaagctcattttcaacgctgtttggttcatgtcatgcgcaatatctgcgctaaagtacgcgtcgacgatcgtgaaaagatcatgaacgaattcaaacaggtgcatcaacagacaaacaaagaagaagccacagctgtcctgcatgacttctataccaaatggggcaaggtttacagccatgttatcagaagcttgaaagacatagaaccagatctgctggtcttttataactatcccaagcagatcagagcttcaatttattcgactaacatgattgaatcatttaacaatgtgatcaagcgcaaagctaagcctaaggcagagtttccaactgaacagtcgcttgatgcttttattggcattcaggcaatgagctacaatgaccgttatttcaatcgaattcataaaggctttggtcaggttcaggacaccttagaatcctactttgattaaataaataattaaaaaatcaatttacgagaaagatctatttacacaaaagatttgacagtttccataaaacattaacctcgtttaattaataggtttgaataaataataatataaaaggaatttttaaatacaagtgcaacagttttatggatagaacataacttaagtaggaaaattacaaatttgtttgataggcagatttatttaagaaaataggagaggagtaaatttcttatggttggttttgaagtgcaaaagcaaggaaaatatgtcaatacacttcctgatagagttaaaaatagtgatttagaagtattaactaaggaaattaaagaatgtgtaagttcaataaaagatataagcatgccaaaatcaggaggtatgtattatgggctagcggggattatttactcgttgattatgtatactactgtgtataaagataagagttttagcagtgctatcagaacaatgctgaataatttacagttttatactatcaatattgataatactttatttttgattgatggaacatttcataatgtgaacgtaagttttcctgatggaaacttaggattgataaatgttattaaaatggcagaagaggcaaagatatgttttctataaaaaacttgcttaagttaaatccgataagatcaactatcattataacttcttgtcttatttcatcgttgttaacagtctttgttcgttataatttaacatggcaagcagatcttctgaaagaaaacaacattcaaggatttttatatctgagtttgattagtctgatagcatatatattaagctcaatactaagtaattttggtaattattttttacttactaaaagcgttcaagaatatttgcattcaattagaggagcaatgcttaagagatatagcaacaatatagattcgagtaaagtgcaaaatgatttaattaataatctagaaacagcggaaaatcaatacttatttttagtagcagctctattagaatatatttttctatttatattttctgtagtagcaattttatcacttaattggattattgtattgagtacgttgatcttggccctaatattgttaaaattaccagatatgtttaagaatgttgttggaaaaacaagcattgctaattcagaacaaacacagaaatttttagcagatatttccaattggacaaggggtttagatgtgttacaccgatttaatttacgtgatgtttatttgagtaaattaaattccgctggtactagttatactaaagtctacctaaaaaacgttaaaattaataagaatgtctcattaattgttgtactgagtaatgtcattgcccaactgctaatttctgccttaacagggatgctgattttgcataataaactgaatattggtgcttttttcagtattgggggattaattggctatacgtttagttatgtagtaataatctcaaatggacttgttcagatgaaaaatggcaaagccatagttgatcagattaatagtcaattagaagaaccactctttcatgaaaaggcagagaaaaattataaagatgtaaagtacttgatttctaacttgagtaaaaatttttctaacatgactaagataatatatccggatattgaaataaatcagggagataaaatcttactaacaggaccttcaggaataggaaaaagtaccctatttaaattgattttgggcgaattaactccaaccagtggaagtatagtggctgtcgataaggatggtcagaaacataaaattattcgtaaccaaattgggtatatttctcaagaaccagtactgatgccagcttcaattattgataatattacaatgtttaatcctaacatgaagaaaaaggcacttaatataattgacaaagtaaagttaaaaaaggatatacttaattttaaagatggaataaataccatagtaactactgataaaagcaacatatcaggtgggcaaaagcaaaaaatagttttggctagaaccccattatataataaaccactgattttggtagatgaagcaacaagtgcaattgatgcgcgtaatgcaaaagaaattttaagaacggtgacaaaggttgacgctacagttattgttatcgcacataacttgactaatgatacgagacggctttttgataaagaaataaaattaagtgatcaaaacgtttaagagaatagctacttaaattaaaaggaattgctggttttagcccaattcctttttttgcatgttaaaataaaatagacattttagacgattaaaggagtttgattaatcaatggctgataaagatactttttatattacaaccccaatttattatccatctggtcgtttaacgatcggaaatgcttatactactatcgcagctgatacaatggctcgctataagcgtagtcaaggctatgatactttctttttaactggtactgatgaacatggcttgaagatcgaacaaaaggctgaagcacaaggaatcaagccacaagagtttgttgataagatggctgcttcttacaaaaaattatggaagagccttaacatttcttatgacaagtttattagaactactgatgaacaacatgttcaagctgtccaaaagatttttgaaaagctgttaaagaaaggcgacatttatttaggcgaatatactggttggtattcagttgaagatgaagaatatttcactgaatcacaattagctgaagtctataaagatgatgatggtaatgtgatcggcggtaaggcacctagtggtcatgaagtacgcctagttaaagaaccatcttatttcttcaagatgagtaagtacgcagaccgcttagtagaatactacaaggaacatcctgacttcattttgcctcattcacgtgaaaaggaaatgcttaataacttcattaagccaggtttggaagatttatcagttacccggactactgttaactggggaattcctgttccaagtgatcctaaacacgtggtttacgtttggatcgatgctttgtctaactatattactgctttgggctatggttcagacgatgattcattgtttaagaaatattggcctgcagacgttcacttggtaggtaaggaaattgttcgtttccacactatttattggccaattatgttaatggctcttgatttgccacttcctaagcacattatcggccatggttgggtattaatgaaaaatggcaagatgtctaagtcaaagggaaatgccgtttatccagaatcattgactagtcgttatggtgttgatccacttcgctactatttgatgcgtgctcttccatttggcgatgacggtatttttacaccagaagactttgttgaaagaattaattatgacttggccaacgatttgggtaacttacttaacagaaccgtgtcaatgattaatcaatatcaagctggtcatgttgatgcagttcctgttgctcaagctgaatttggcaaagacttgcaagatacagctgctagtgtcattaatgattacagagaaaatatgaattcacttcacttctctaaggcattagacaatatttggaagttggtttctcgtgctaacaagtatattgatgaaactactccatgggctttgaacaaagaaggtaaaaaggaagaacttagcaaggtcatgagcaacttggctgaaagcttgcgtttaattgctattatgattgaaccagtaatgaccgaaactgcaccaattatgttcaagcaacttggtttaaattgggacaatgaagacgctaagcatttggcctttggtgactttgattgggatgttaaggtaattgaaaagccacaaccaatcttcccaagacttaagatggacgaagaagttaagtacattaaggatgaaatggctaaggctaagccaaagaagaccactagaagtgaacaaaagaagaatgacgaaatcaccattgacgattttgacaaggttaagatccaagtaggccaaattttgtcagttgaaccagttaaaggctcaagcaagttgctcatgttcaagctggactttggtaatggcaaggaaacccaaattttgagtggtatccgcaagttttatccagatgcaagtgagctgttagacaaaaaggttttagctgttactaacttaaagccacgtaagatgctgggtcaccttagtgaagggatgctcttatcaagtgaaaagcatggcaaaattaagttagctcttgttggtgatgaacatgcagttggggctgaactcggctaatggagatcattgataatcatactcatttgaatgacgagccgtttcgcggcaaggaacaatattatttagaacgagcaaaagcacttgatgtaaccaaggttatttgtgcggggcaagatcctgactttaatcaaagagcggttgacttagcacaaaggtttgataatgtctatgcgatggtcggttactgtcccgatgtggctaaagactatgatcaacaggctgaagataaactaattgaacaattgaagcagcctaaggtagttgcaatgggcgaaatcgggctagattattattgggatgaatcgccgcgcgacgtacagcgtaatgtttttgcgcggcaaattgaagtagcacatgacttgaagatgccagttgatatccatactagggatgcatttggagattgttataacatcttgaaaaatagcaatctggaatatggtgctgttttgcatagttttaacggtggtgttgactggttaaataagtttttggatttgaatgtttacttttcatattcaggtgttgtttctttcactaaggctacggaagtacacgagagtgcaaaagctgcgccacttgaccgaattttagttgaaaccgacgcgccatatttaacgcctaagccatatcgtggtcatcaaaatgaaactggctacgtacgttatgtggcagaagcaattgctaagttgaaggatattccactagagaaagtggcggatgctacttataagaacacagtgagagtttatgggcttaaataaaaagaattttgatgcggtaatcgttgttgaggggaaagacgataccatccgtttaaaacaatttttcccaggaatcgagacaattgagactaatggatcagccgtttcagatgaagtattgaagcaaatccaaaaattaagtgagagtcggcaaattattgtctttactgatcctgactttaatggcgaaagaatccggcgcattgtaactaaagctgttcctgatgcaaagcaagcttttattacccgtaaggaaggcgaacctcataaaaaggggagtctaggtgtagaacatgcttcaaaagaagcacttgagcatgcactaagtgatttgcatgaggttgaaccgcaaaaaagtgatttaactccagcaatttatcggcaattaggtttagctggtggtagcggctcacgaaaattacgtgaacaagtaggcattaaattacgagttggctatggcaattccaagcagttttataatcgcttgcatacttttggcgtttcattagctgaattaaaggcagctgtcaaggaggtagaaaatgacaaataatattccaattggctctccagttagaacacaagcaattgttaaccgttactttgtcaaagctaaaaagaacttagggcaaaatttcttagttgatcagactgctattttaggtattgttgaagctgctgggataaaaaaagatgatcaagtcattgaaattggaccaggtattggctctttgactgagcaactactgttggcaggtgctaaagtttttgcttatgaagttgatgatagcttacctacgattttacagaatgaactgcctaagaaaattgatgatcagcctttggctagtcgctttaagctgatcttgaaagatgtattaaaagcggactttaaggtagatattagtgacttctttgattttactaagccaattaaagttgtagctaacttgccgtattacatcactacgccaatcatttttgccttagctgaatcagatttgcactttacttcattgaccttaatgatgcaaaaagaagtagcagaacgattagaagcccaaccaggcagcaaggaatacggtccgttgactatttccgttcagaccgaaatgaatgttaaacttgctttgcaggtgagtcataattcctttatgccgcgaccaaaagtagactcgagcgtagttgtcttaacgccactgaaggaaaagccagcaattgaaaatcgtaagcattttatttgggtagtgaaaatgtgtttttcacaaagaagaaagacactcaataataatttaaaagctttgttgcctgataaaactaagcgtgatgaattatttgcggaattaggggtaaatccaagaattcgccctgaagaattaacaattaaacaatttattaaaattgctagctttattcctgcaagatgatgtataatattgaatttattatatatttgtgataaaatgttgctaaaggagctgttgtttagtgccaacatcaattatcacaattaaacataagttggattctcacttaggtgatactttaacagtagtagctcaagcgggtcgtaagaaagttactaagagacggggaattctaagagagactttccctgcagtgtttgtggttgatttagaccaacatcaaaataattttaaacatgtttcttacagttataccgatttactaactaagaatattgcattagagtttgatgatgaagctgaagaggctgaagcttaaacacaatttttgaaattgtcactagcatttatttaaaatgttagtgcttttttttgccctttagagtatattaattaagtataaaccaaacattagaaaggagatttcatgaaacgttcagaaagattggtggacatgaccaaatatttaatggagcgtccccatactttaattgcactaccattctttgctaagcgttacggcgctgctaagtcatctatttcagaagatttagctattttgaagcacactcttgccagcaatcaagatggtattttggagactgtagccggtgcagctggtggcgtgcgctatattccatttttaggtaaaaaacacgcggaagcatatttgtcagatttatcaactaggattgaggatccaagtagaattttagccggtggttttgtgtatctgtcagatattttaggcaatacgcaagatttacgtaaaattggtgaattagtagctactcattatgcttatgaagaaatcgatgctgtcatgacagttgaaacaaaagggattgctttagccaaagcagttgctcgttttttagatgtaccatttgttacagctagaaagcgatcaaaggtaacagaaggtgctactgtttctgttaactatatttcttcatcgttgtctcgagtatcgaagatggaattaccgactcgtgctcttaaaaaagaagctaaagttttaattgtcgatgattttatgaagggtggcggtaccctaaccggaatggaagaattagttaaggaattcgatggtactattgccggcgtttgtgtactctgtgaagccgattttgacaaagaaaagctgattaagaactatctttcattagtaaaaattagtgaaattgatactgcccaaaagctgattgtagcagaacctggtaacttcttaactgaaactgattttgaccgtttctaaaatggtatactagaatcaagttttgattattaagaggttaatattaatggaaaaatatgtagttgttcttgccgcaggtaagggcacacgaatgaagtcaaagttgtacaaggttttacacaaagtttgtggtaaaaccatggttgagcatgttgttgatgcagctcaaggcgttaatcctgcagaaatcgttacaatcgttggtacaggtgctggcgatgtagaaaaagtactggcagacaagtctaagtttgctttccaagaaaagcaattaggtactggtgacgccgtaatgactgcgcgtgaagaattgggtgacaatgatggtgctactttagtagttactggtgatacaccacttttcacaactgatacatttaatgaactattcaagtatcatgcagaaaaaggcaatgctgcaactgtattgaccgcggaagctccaaatccatttggctatggtcgaattattcgtgatgatcaaggcaatgttttacgaattgtagaacaaaaagatggtaaaccagaagaattaaaagtaaaagaaatcaatactggtgtattttgctttgacaataaaaaattatttgaagcattgaagcacgttaataatgacaatgctcaaggtgaatattacttaactgatgttttagaaatcttgcgcaatagtggtgaacgcgttggtgcttacaagatgcctgactttagtgaaagccttggcgttaatgaccgtattgcattagctcaagctactaagactatgcaaagaagaattaatgaacagcatatgcgtgatggtgtttcatttatcgaccctgatactgcttatattgatgcagatgttaagattggcaacgacactgtaattgaaggtaatgttgtgattaaaggaaacaccgaaattggtagtgattgctacattactagtggttcaagaatcgttgattctaagattggtaataatgtcactgttacttcttcaactgttgaagaagctgaaatggacgataatactgacatcggtcctaattcacaccttcgtcctaaggcaattattcgcaaaggtgcacatattggtaactttgtggaaattaagaaggctgagattggtgaaaatactaaagtaggtcacttgacttatgttggagacgctaccttaggtaaagacattaacattggctgtggtacgatcttctctaattacgatggtgtaaagaagttccatactaatgttggtgatcatgcctttattggtgctggctcaacattgattgctccaattaatgttgcagatcacgcctttattgcagctgataccactgttactaaggacgttaataaatatgacatggcaattggccgtggccgtcaagttaataagccagattattggcataagcttcctctttctcaagataaagaatgggattaagaataaggcactagtgtatcaagctagtgcttttttgttaagaattgctaaatacttattgcaaaataataattgagacctacaataaggtgtactaataataatttttacatgagtcatgtggtaataagtcaaatgaaaggcgatgatatttgttctttttgatcataaatttgagtatatgaaactaagccttggtaaaggttgatttttttaatgttaaacttttgtttacttttaaatttagaccaatttttgaaattaagacctcggtgtcctgtacagtttgtcatctttgagcaatttaaagataactcgtactaattttcttgcagttaatgtgcaagcacgtttatgcggcgagtagacagcttcatcatacttcttttggtaatattttttgaaaacaggatcatgtaatcttgctagattggcagcttcaatcaagtaatatcttagatatctgtttccagtcctggccattggagtatgttcgttgctgtgatctcccgattgatattgattccaggttaggccggcatacttagccagctgttcttctttatcaaagcgatcgatacttccgatctcagcgataataccagctgtataggttttgccaataccgggaattgattccagaattttgctttctggtaatgcatcaacgatacgatcaattgctttttctagatctttaatagattcattaaagctttgaatcatgttgtaatgaacagaaagcactgcatcaattgaatcagtcattactttgcctaagcgatatgaacctctaacagctttcttaattgctttagccaaggtatctggatcggaaaagcgtcctctgcctttaacctgtaagtaagaaattaagtcttcggtaggcatatccgcgatctcatccagagttttactatcggttacaatagacatcattgtagcaccgaaaagaggagtattaatcttatctttatcgacagtgattagtttattaacccgataatataaagcttcaatgaagtgctgtttggtacgagtcagttcttgaactaattcatatctggtacgcgttaaacgctctaaagcaagatagttgtcttgtctggcaatgcttactcgataatgtccaaagcttagatacaaagcaatgtaataagcatcgagaggatcagttttactttcttcaaagactttatgaaacctgctggtttctttggggttaattacatcagtctctacattgagcttttgtaaatcttcgtcattttggaaaaagtaagcaggatgaaaactgtaaatagatgtagcttccatgccaataatgatttgatcatagtgtttattttgagctagatctaaaatttgttttttcagttcactagcaccataaagatcattgacaaagctatcgttaattaagcgtttgttttgatcttctgaatcaagtgcaacgacctgtaaatctttagaactaacatcaataccgacaaataatttcattggaaatggcctcctttctttcaaatttctgatcatagattttgatcttcacatgttaacccctaattacagttcttaagttcaatctcgccagtataagtattcactggttgcttctttgaaagctgcacctaatcccaattgctcaaggactagcaaaaagaagcaatcaatacagcatgtgagttagagcataaaggaactgtctgggtggcagacttataaagcagacaaaactgcaggaggtgataacctagaccagttgaccaaagccaatgacaattagaggctaacatgtgaagatcaaaaagcaaatactaatttgattaattatcacaatatgactaattacaatttatataatacgaggtaggtaatacaatgaaattaagtcataagttagttatggtttcagcagctgttttgatgggtgttagcccagtattaggcatggcagaaaatactgtatctgttcaagctgctactaagagtactaatggcgtacataatacttacggtaaaaacagcaaagtcaaagtaactaagactatgaagtttgtcgaccgtaatggtaagaaaacttctaagactgctcctaagggtggtagctacactatttggaacgtcaagaatatcgacggtcaagtttactacagtattcaaactgatttgaagtactggattcctgcaactgcaactgaaggtacagtaacttataagtcaggcaatactacttatactttaaagagtgatggcaagaaggtaacaacttctacttcaactaagaaggctgttaagaagactaattcaaataaaaacactaaaaaagtagttaaagaatcaactaaaaaaactgccactaagactactaaaaaaagcaactcagaaaagactactaagaaaacttcatcaaagaagacgccagtggctaaggcagttaagataactactaagaataaggcttacgtttacgacaagaatggtaagcgtgtaaaaaactatttaggcactagttacattggtaaaaagatcactgttaaaggtttaggtactaagaccattaatggtgttaaatattatgctttgcaaccaaatcattattacattaaagcttcagatgtaactgttaagtaataattgataggaaaaagacactttttcgttatgaaaagatgtctttttcgtttctaaattggcaaaaaaatattttagatctacaatatataaatgaactttaagtttagtaagaatgaggtatttatcgatgaaattaagtcataaattagttatggtctcagcagctgcattgatgagtgttgctccacttttggatactgcagaaaacgtcaacactgttcaagctgctcctaagaagactacttcaaagaaggcagcaaacaacaagatcactttggtacgtaatgcttatgtgtacgataagaatggtaagcgtcttgataagtacatgggcagtgcaaaaaacactactattgctaaaggcgtaactgttacttcaactggcactaagactatcaatggtgtaaagtactacgatcttggtggtggtgcttatatcaaggctgttaacgtagatggtaaagctgcgtcatcaacttcatcactgtcaaagggtactaaggctaagtttgtttctaactcatacatttatgacaagaacggtaaacgtatcagcaagtaccaaggcaaatctaagtttgttaagggcgattcagtcactacttacggtattcaaaccattaacggtaagaagtattaccaacttgacaagaagggtactgcttttgtacgaactgttaacattgatggtaaaaccacttcaaaccaagaatcatctgtttcaaatgatgcagaatcaactaaaaaatatgactactcattaaagaagaatgcttatatttatgataagaatggtaagcgcatcaacaagtaccaaggcaagtctaagcttttaaagggtgccgcaattgatgtttatggcattgaaaccattaagggtaaggattactaccaacttgacaagaaaggcactgcttttgttaaggcaagtaatgtaactagaaccgttaaggcaacttcaattaccatgaagaagaatgcttatatctacaatggtaacggtgacaccaagaagaagacagttaagaagggtaagactgttaaagctactgaagcaagatacattggtactaagctttactacaagattagtgataatcaattcgttaaggctgctaatgtaggtaaaatttcaggcccagaactagaaccagttaacgaaccagatggtgctgctactgttgatactggtgataatactgtagatccaaacgtaaccaaggtaactacgattaatgttgctccactttacaacattaagggacaaccagataacgttagagcatttggcgcaggtcaaagtcaacaagtttcagaattgagatatattgcaacttctgcaactgctaccccagaattattctacaaattatcaagcggtagaggctatttaaagaagtcagacgttgctgtaagtggtaagattttaactcctgttaacactccagaacaagctagagcagacgttacagttgctacagcagctgataagactaagttgcttcaagacattaacgaagcaactagtgttaagaactcagaagcttacaagtttgcttcaagtgatgccaaggttgcatatgatagggcaattacaaatggtactgctgttaacaacgatgctgcagctactattgctcaagttaacgaagcagatgctgctattgttagtgcaaaggctaaacttgatggcaagagagttgctgttgctaacatgaccaatttaacttcagatgaaatggcagctattattaaggttgtagctaatgctaataatgtagcagaaagttctgttcaattaactactaacggtagtttatcaattagtgttaacggagctgcacaaattttgaacttaggcgattatgtaacacaagctgcagttgcaaacaactaaaaatatataaaataagacgtagtatctaaaatgacactacgtcttattttttaggatattttcgttgtactagaaagtacaaatatattctaacttttttagcgattaatagttagtgcttttttatggttgcggcaaaattcttgctataattaaggagaatgtggttctttttagagcaacttttgctaaaatagagctggttaaatatttttacggaggaaattatgtcctataaagacgatatgatgatcttcgcccttaactcaaatgtaccattagcacaaaagattgcggatcgtgtgggtgttccactttccaagtctagtgttgaacgtttcagtgatggcgaaattcaaattaatattgatgaaactgtgcgtggtaaagatgtctaccttgtacaatcaaccagtaagccagttaatgacaatttaatggaattgttgattatgattgacgctgtacgtcgtgcaagtgctcgtacaattaacattgtgatgccttactacggttatgctcgtcaagatcgtaagactcgtgctcgtgaaccaattactgctaaattggttgcagacatgcttcaagctgcaggtgctgatcgcattctttcacttgacttacatgcaccacaaattcaaggtttctttgatattccagttgataacttaatgggtgctccacttttggcagactacttcttgcgtaacggcttagagaaagacgctgttgtagtttcaccagaccacggtggtgttactcgtgctagaaagcttgctgaattcttaggttgcccaattgccatcgttgataagcgtcgtccaaaggctaatgttgctgaagttatgaacattatcggtaacgttaagggtaagcgtgctatcatcattgatgacatgattgatactgctggtactattactttagctgctcaagccttaattgatgcaggtgctactgaagtttatgctagtgcaactcatgctgttctatctggtccagctattaagagattgaacgattcaccaatcaagaatttggttttgactgattcaatcaatcaaccagcagagaagaagcttgacaagatgcttttggtatcagttggtccattgatgggcgatgctattaagtgtatccaaaaccatgaagcacttagcccattgttcaacaccagatacgaagctgacaagaacaagtaaaaattatttgaagataaagaaaacgactagtctagttgactagccgtttttttcatatgtttgagagagtttttgaaataaatgtaatgaaaagtaaatattttataaatcggttccgttagattcgatgaccttcttgtaccagtcgaatgaatccttcttgtagcgcttcatagagccgttgccatgattatcttcgtcaacatagataaaaccgtaacgcttgttcatttcgccggttgatgcacttactaagtcgatgcatccccatggtaagtagccccataaatccacgccatcttctgtgacagcttttttcatctccttgatatgactacgcaagtattcgatgcggtaatcatcatgaaccttgtgatcgtctgttagtttgtcgtaagcgccaagaccattttcaacgatgaataatgacttgtgccagcgagtagtcatccagtttaaggagtagcgcaaaccaactggatcaacaggccagccccaatcgcttgccttaacgaatggattttcaactaaatcactatattcgcgataatccatgtggtcagtgtatttaactgcaaaggacatgtagtaagagaaggcgatgtagtcaactgtaccatgtttcaagatttcgagatctttatcggtgatgtctaagttgtagtttttgcttttgaagtattgagtaagccatcttggatattcaccgttaacttgaacgtcgccgaagtagaggcgagagtccattgctctttgggcaaagaggatgtcttctggcttaggggatgcaggataaattgggcagaaggcaagcatacagccgatttgcatatctggattgattgcgtgaccaatttgtacggcttcagcactagcgaccatttcatagtgagcagcttggtacattagcttttgcttgccgtcaccttccttgaatttgatgcctgagttttcgtaaacggagatatcactttcatagttagcttgattgttaatttcgttgaaggtcatccagtacttgaccttgttgtgatagcgttcgaaacaaacgtgagcaaagcgagtgaagaagtcgatcaattttctgttgctccagctgccatattcagtgactaaatgatatggcatttcgaagtgggaaagagtcacaacaggttcgatgttgtactttaagcattcgtcaaatactttatcgtagaacgctaggccttcttcgttgggttgtgtttcgtcgccattaggaaagattctggtccaggcaattgaggtgcgaaaagccttgaaacccatttcggccattaatttgatgtcttctttatagtgatgataaaaatcaatggctttgtggttagggtagtatttatccttttcgatggtggcagtcaattcacgagggtgatttggtccgccgagagtcatgaggtcggcgattgagatgcctttgccgccttcattgtagccaccttcgagttggtgagcggcgacggcgccaccccatagaaagtttttagggaaagtagattcagtcataataaaaaactccttttgtctaacttgttataagcattatatgaaatcggtttcataaatgatagacaaaaggggcttttaggaatggttcgataaaatggctggttgtacctaaagtgaaacaggttgtttcatctatttattgtttttctttttcaattaaaatattgacgattccttcaaccaaatacattacaggtacttgtgaagaaaagtcgtaagcttcttttctaaccatttgttcatggtaggtaagggaataacggctcatttttgcgatagcgctagtttcatcgccggtgatgctgatcagaaggatatcgtcattgttgacaaatcgattgatcatttccaccatttcagtggtattacctgatacagaaaagcaaataatgacattattggtagtattttccaatttgaaaacgagcggatagaacggatccgtgacaggagaggtatttaatcctagagctgccatctttcttgcggcatattctgctaaaaaggctgaatcacccattccgatagtaataatgttgtctgcttgatagattttatctgcaacgatgttcagcttgctcaaagtatcactagggaagttatcttcggtaacgtaatgtactttcacgttgtgcaggctttggtgattgttttttaaataagctttaaattcagggaagctgttaaaacctatcttatgaataaagcgcataacagaagaactagagacgtgcgctccttgggcaatgtctctgacgcgcatgtaaattaccttatcattgttttgttcgatataacgatagatagtcatatcaacggtagatagttttgataaatctttaaatccaaaaaatgccataatcttattccttaatgtgaaaactttaaactaattgtactatattggaacactgtgttccaatcacgaaatattgagcttaaaaacagtatgatacctatctcctccaaaagccttgtctaacagcaaacgctttcatagaattaaagatgtcaaatgaaaatacgttagtaaaaaagttggaggaatttttttatgaagaattttattaacaataaaatattgccgccaattatgaaatttgttaatacaaaagctattattgccttaaaggacggtatgcttttgtcattaccattcattatgatcggttctttatttttactgcttgcttcattcccaattccagcagttgctaattggatgaatcaaacaggtttgactccattttggaatcaagcttacaatgcttcatttggtattgtagctgtatttgccgttgttggtattgcttatcaatgggctaagaatgaaggggtcgaaggactccctgctggtatgactgctttcgtaggattcctaattttgatgaattctactactccagttatgaacggaactaaaaccgttgtttctgctcaacaagctccaactcttttaacaggatttattgatcgtacttggcttgggggccaagggatgatcgctgcgatcattgttggtttacttactggttggatttatacttggtttgttaagcgtaagattactattaagttgcctgaacaagttccacctgcagttgctaactcatttattgctttgatcccagcagctgtattgactgcattatggcttcttgtatatatcttctttgaaaaggtagctcatactactttaactcaatggatttacgcaactattcaaacaccacttcaaggtataaccgactcatttggtggtatcttagttttgactttgctagtaccattcttctggttctttggtgttcacggttcaactttggttggtggtattgctggtccaattttgagtgccaacgctttgcaaaacgcagctatctttaagaaatacggttacgtagacgctgcacacggtggtcacatcgttattcaaggtttgtttgaccaattctcaactgtaactggtgcaggtatgactatcggtttggttgtcttcatgtgtttcatggctagatcagctcaaatgagaagtattggtaagttggcattggttcctggtatttttaacattaatgaacctgtattattcggtgttcctattgttatgaacccaatgcttgcacttccattctttatcatgccaccactttcggctggttcaacttacttgttaatcaaagcaggtatcttgccataccttaacggggtccaggttccatggactactccacctgtaatttctggtttcttaatcggtggttggaaagttgctatttggcaggctattatcttaatcatttcattttttgtatatttgccatttgcacgtagctatgacaacgtgctttacaaacaagaacaagctgccaaagctaaagaagaaaaataatttaaagtagaaaaaatgagcttttatctctatcatttaatttgtagaatagaagctcatttttaataggggaaaataatgaaaaaatatctctcaattgacattggcggaacgaatctgaagtatgccttaatcgacgaaaaaggacatattctagaaaaagaccgcgttaaaacagatgcaaaaaatcttactgcatttatggaaaacatgtatgaagtgatcgattcatatcaggatcaatttgaaggtatcgcaatctgtgcaccaggtaagatcgatactgaaaataagatcatttatttcggtggtgcgttaaagttccttgatggtttaaatcttcaggaagcattaggtgataaatacaatgtgccaattagtgtggagaatgatggcaaagcagccgctttatctgaacaatggctcggcgaattgcgcggagtagatactggtgttgcaattactctaggcactggtgttggcggcggtgtcgttgttaataatcatcttttgcatggctggactttccaagccggtgagcttagctggatgattactaattctggtatcggcacaaagaacaaggctgcatatactggtgataattgttctgccgttaatatggttaaaaaggtaaatctagctcttggaaataaagatttagatgatggacttactgcctttgaagcgatcaataatggtgatttacgtgcattggcaatttttaaacgttactgccgcaacgttgcgattatgattattaatattcaaactgtgatcaatgcttcgaagtttgtgattggtggtggtatcagcaaccagccaatcttgattgaagaaatcaataatcaattagctaaaatccttgaagtcaacccaatgattggcaagcagatgatcccaccaaaaattgttgccgcaaagcatggcaacgattctaacttatatggtgccttgtattcgcttttgcttgaactgaataagcaataaaaaacagcctagttcgtttgaactaggctattttgatctacttattttttaacgtctgacatgaacttagcaatgcttacgctagctgtcgcaacacaagcgaccattgctgtcttacaactaatgtcgacaatatctttgactaaatccttattttcatggataaatttgaaagatgcattagtgtaatccatgcagtagccgtgaatagtgttcatcaggtctttcacttgagtgtagccactcttttcagcacgttttggttcatcctctgggttgatttgagttcttacatcattgttcataacaaatacctcactttcatttatacttatattttatttctttctaggtcttcttaagtaccttaatgcaccatttttaatatatttttgaaattgctcataaagtggatcgaaaatttgcggctgatcttcatcgtgactgagcatagttttagggaagaagaagcgttcatctccttggaaagtaccatttaatgcgcgaaccaaggggctgagttgggataactcaatcatgctgctgtcgtcttgcataatttcaatttgactattagcatttttccccgttggcttataagcatcatatggttcatcgaatgcggaattggtagcggtatagtagtcaggattaaagccagcttgcttgattaggctcttgagcttaggtaaaagatttttggtttcttcatcgattcggacactagctagcggttttctgtacaagtaacgcttggctaggtcagataagattggatcttgtgcctgggtccacatagaaaaattagtttccattactccatcatcaagctttaaataatcgtctaaagtccaattgccttcaaggaatttagtcaagctaggtgtaacttgcagatttccctttttataaacagcttgagcgcgctctaaaaggtgatgcaagatgacttccattgagcgtcctacgcggtggaagtagacctgttggtacatctgatagcgtgacacgatatagtcttcaacggcatgcatcccattgttggtaaaacaaataccattttgataaggacggattacccgtaaaattcttgataaatcgaacctaccatagttaactccggtgaaataagcatcccgctgcaaataatccatccggtcagcgtcagcttgacttgagatcattttaaccacttgcggattaggataagtcttagcgattacgctggcgactaattcaggaaagttaggtgcaacttgttttaatgcatggttaatttctgtattaggatcagtaatgatcttttgtccaattttttcatgattggtgccaaaaaggtgctcgaatgtgtgcgaatagggcccgtgaccgatgtcatgaagcaatccggcacattctaccagtaatcgattatcatcgttccagagaccgtctcctggcgtaattgagggatattttttgctaaagatatcgcaaattcttctcgttaattcataaacgcctaagttgtgctcaaatctagtgtgagttgcacctggaaaaacatagctaacaggacctaactgtttaatgcgacgcatgcgttgaaattctttagacttcagtatgtccaaaacaactttatcttcaatatgaatatagccgtgaaccggatcacggagaacaacctcttgttttaatttttcgctttgaaatcttgtcataaaaatccaccaagtttaatttattaattttttgaactatatataataaaatagattatatctaactaaaattatatcagagatatagtaataatgtttaaagggggcgcttgtttgacagcaattacgattgatttgactagtaaaattactcaagacgatgagacagagacttttacgcgacatgcgcaagggcaattgactgaagaaggcgacgtcacacgaatttcttatgccgaagaagggcaaattccagtgaagatgcttctaaaggagaatgaattgttgattcgccgcggcgttgacagcaataattattctttaatgaaatttattccgggtgaaaaaggcaactgccgctatgtagttgaagggcgccgcatggacatgaccagcgtgactaacttgcttgaatatcagagtcaagatgatggttcacgtaaacttcgggttgaatatgacctctttaatggactatacttaataggtaactatgcagtcacgttgatttttacttaaaggcctagtagaatagtaaagattgtataagagaggacgtacagctgtgggattagacaaatttaaagacaaaaatcgcgatgaattgtcaatgatcgaagttgctcgtgcaattttggaagacaatggcaagagaatggcatttgccgatattgttaatgccgtacaaaaatacttgaataagagtgacgaagaaattcgtgaacgtttaccacaattttatactaatatgaacactgatggtgaatttatctcaatgggtgaaaatgtttgggcacttcgttcatggttcccatatgaatcagttgatgaagaagttaaccaccctgaggatgaagaagacgattcacgtaagcaccacaagaaggttaatgccttcttagctagcgctactggtgatgatgacattatcgactacgataacgatgatccagaagatgacgacttagacgccacagacgatgatactgatgatgtattgccagatggcattgaaggtcaattgtcacaattaaatgatgatgatgatgatgacgaagaagataattaatttgcttgacttaagaagaaaaagcagataatatttttgttgggcaccctatgtgcgtttagctccccgttagtgggagcttttttgtttaaaggataagttaaaaggagcagaacatgacaaaatacatcttcgtaactggcggtgtcgtatcttcacttggtaaagggattactgcatcaagtttaggtcgacttcttaagaatcgtggcttgaaggtcactatgcaaaagtttgacccatatattaatattgacccaggtacaatgaatccataccaacacggtgaagtttatgttaccgacgatggtacagaagctgaccttgacttaggtcactatgaaagaatcgtaggtgttagaactagcaagtattctaacgtaactactggtaagatttaccaagaagttttggaaaaagaacgtcgtggtgactaccatggtgctactgtacaagtaattcctcatattactgacatgatcaaaaagaagatcatgcgtgcagctttgactactgattcagatgtaattatttctgaaattggtggtactgttggtgatatcgaatcaactccattcatggaagctattcgtcaaatgcgccgtgaagttggtccagaaaatgtaatgtacattcactgtactttggttccacttcttcacgctgctcatgaaatgaagactaagccaacacaacactcagttgctgagcttcgtagtattggtattcaaccaaatatgttagtgcttcgtgctgaacaaccaattgaccaagaacacaaagacaagatttctacttttacagacgtgcctgttgatcgaattattgaatcaattgatgctccttcattattcgatgtgcctttgaacttccaaaagcaaggcatggatcaaaaagtctgtgatttcttacacttagagagtccaaagccagaagctgacatggaagcttggaagaagcttgatgaacgtgctaagaccttgaagcatcacactaagattaccttggttggtaagtatgtagagcttgaagacgcttatatttcagttactgatgctttgcaacatgcgggttatctttacaacactaagattgatgttgataaggtacaagctgaagacgtaactgaagataatattgcagaaatcatgaaggattcagatggtttgattgtccctggtggttttggtactcgtggtcttgaaggaatgattactgcaattaagtatgctcgtgaacatgacatcccattcttaggtatttgtttggggatgcaaatggctagtgttgaatttgcacgcgatgtattaaaccttgaggatgctaattctgcagaagcagagccaaactgcaagaataatattatcgacattatggctgataagcgtgatgaagaaaatattggtggtactttgcggttaggtatttacccagctactcttaagaagggaactaagactcgtgcggcttacgatgatcaagatgttattcaagaacgtcaccgtcaccgttttgaattcaataatgaataccgtgaagcctttgaaaaggctggtatggtcttctcaggcgtttcaccagataaccgcttagttgaaattatcgaattaccaaagaaaaaattctttattgcagcacaatatcacccagaatttttgagtcggccacaacgtccagaaggcttatttaagtcatttattggtgcagctagtggtcttccagcacaagaattttaaagtgattaaagtttgattatacaaaatcttaagaaaacaagaactgagagacctcagctcttgttttttttgtaaatatcctttaacattattatgattaattgaaagtagaaaaggatttgttttcgccaatgaagcagatgataattcatggtggaaagcccctgcagggtgatgtttggatcggtggagctaagaactcaacagttgctcttattccggcatcaattttatcaagaacaccagtgaccttggaaggcgtcccaagaatagctgatgtggttaacttgatggacttgttaagtgagatggatgtacattgtgatttcggtgaaaccactttaagaatagatccaactgatatcaaaatgagtccgttgccagctggtaagattaagagtttgcgcgcttcatattactttatgggtgcgctacttggtcgctttggcaaggcagtagtgggcttccctggtggtgacgatattgggccacgtccgattgaccaacatattaagggctttgaagccttaggcgctagcgtaaaaaatgaaaatgatcaaattataattactgcaccagaagatggtttgcatggagcaaaaattcatttaaagatgccatcagttggggcaacgatgaatattattatggctagtgtgacagcacagggccagactataatcaaaaatgccgcaaaggaaccggaaattattgatttagctaccttcttgaacaatatgggggcagttattcgtagtgctggtactgactctattcgaattgaaggggtggagcagcttaaagcacagattcctcatacgattattccagacagaattgaagcagggacttatgttgctttagctgcctgtattggtaatggcattcgcattcataatattatcgaagaacaccttgattcatacctggctaaagttgaagaaatgggtgtagtaatcgattcagatgaagattctttgtatgtttacccagcgggcgacctaaaaatggtccaggtgaagacagatgtttatcctggttttgcgacagatttacagcaaccaattacaccacttttattaactgctaaaagcggtgaaggtgtagtaatcgataatatttatcctaaacggattggtcatattgctcagttgcaaaagatgggagccaatattaaagttgaagataatattattttggcccatccaactaagcagtttcatggtgcggaagtaactgcaggtgagattcgggcaggtgcctgtctgatgattgcaggcctgatggctgatggtacaacaacgatcgacaaggctggtaatatcttgcgtggttatgatcgggtccaagaaaagctgcgtcaacttggagctgatgtaactatcaaggatgatcctgctgtaccgggtattttagataatatttggtaaataaaaaccacatggaagactccgtgtggtttttgaatatgtcaatttgtaggtgaaaagaatgagtttgatttttacgagacgtgcgcaaaattcagatgtggataaaattgtgcagattttgcaggatgctattacttttttgaagaaaaatggctcaacgcagtggcaaagtggctatcctaaccgagaaacggtggaggaagacatcgaaaagcaagttgcttgggtattaactgtggataatgaagtggctggctatgcggcagtggtgattggaaaagatccaaattatgccaaaattgatggtgagtggaaaaataatgtggatacctatgcgacgatccatagaattgcggttgctagccaatttagagggatgcatttgactcaattgttcttaagtaatattatttcgctgacttatgcacaggggattcacaactttagaattgatactggcgcaaaaaataagatcgtccagcatattgcattgagtcacggttttgttcaacgagggataattcaagtagatgatccgattaatcctgatcgtttagcatatgagttgaatttatgatgaaacgcgtattaattttaggttcaccaggagcgggcaaaagtacatttgcacggaaattgcaatcaaaaacgaaattgccattggtgtatatggatcaacttttttggcatgcaaataaaactacggtctccaagcatgaattagatgaaaaagtaaagcgcatagtagctaaaccagcatggattatggatggaaactatcaacgtaccttgaaatatcgtttacccaaatgtgatacgattttttggttagattatccaactgaagtttgtctagctggcgtaaaagctagaaaaggaaaaccacgtcctgatttgccatggattgaagaagatgaagatccggaatttatgagttatattgccaagtttcggacagttcaaagaccgattttagtcaaagaattgcaaaaatatccaaataagcagatcattgtatttcattctcgccaagaagcaaatctgttcttgcacaaaataaggtaaacgaaaaaccacatggttgaaaattccgtgtggtttttgtatgcgattaattttttaatcaagcaagtcgtatttcaaagtcattaaaccatgaccttcgtcaaccatttgaccaagcagttcaacagtgttgttataaactgtatcagacatcttttgattagcagcaattaacttgtcttgtaattccttacctgaaaggttctttgcttctttgtcagtatcatgttggatcttgtgacattgtgctaaactcttttgttcaaaggcgtcttcaagttcaccgtaaacacggtagttggtatcgcctaattgagcagttaacttgttaagccaaaaaatcttgctcaagttaaatttaggagtggtttgccaagcttcaggggtagtagtgacattagtatagaatggcaccattgagttaaaggtgttaggaccaaaggctaaccattgtacacctgcaatttctgcaggaacatcattacgaatttgcaaaatatgggtttcaaagtttctgttaataccgataggacggaaggtcttcttttgttcaggagtaccttgatcgccataagcatcgtaaggagtgtcttggtagtgtgagctttcggcccatttaatatcttcaattgagattaaacgattagcatggcagataaaaggttgatcttgatctgctggagtgccaccaaagtctggatcgaaatagttgtgaatataccaagcacgaggattattgtagtgagcatccttaatagttgaagaaccaaagatgtggcgcatgttgtagccttcacggtctggattcaagtgatattcttcgattaaatcctttaggtctgctgaacaagcaaaattatcagaatcgttgaagtcgaaagtatcaatattcaaacggtttggtgcaataacatatgcatcatctgggatacggcgtgcaatccaatgatgaccaccgatagtttcaaggtaccaaatgttatccttatcagaaaaggccataccgttcatttcataagtaccgtatttttcaactaaatagccgacacgtttaacaccgtcaaaagctgagtgcaagtatggtaaagtcaaagtgacgaaatcttcttcaccaagaccaccttcacttggatcaagtaatgggtcaacaccttggatgcgtgaattagtagtgatggtttcagtagcggtcatggctacattttcagcgttaattccagctgcgcccaaaataccatttttgcctgaaacatcaggtgctgaagtatagcgtaatggtgtttctgctaaatcagcgtcgtcaatcttttgtttagaaattacactagtgtagtgcttaggttggtcagctgggttaacagctttaaagccttcagggatgatgacgcggccaccgtcttcactacgagcgatcatcgtagagccatcaatagttgcttttttaccaactaaaatagtagtacattctgtttgtttcattggatcagtcctttactttatatttatgtttaaattatttcctaataatattgtatgcaaaaataatccgataagccaaagaatataattaatttccccgaaaggcatttggactaacaccgctatagcgtttaaatgccttggagaaggtaaattcatcgccgtagccgacttttttggcaatttgctttagattgtgtgtggtattagttaattctttcttagcggcttccatgcgcaattgcatgaggtacttttgaggtgataatttagtgttttttctgaataaagcatatagaaagctgcgtgatacgcctaatctatgacagagttcgacaatattgcaggtaggatcggtataattttgcttgagatagttaatggcaatttgatactgatcatttttcggtgttttgcggaccggtggatggttaggaaagtcttttactagatgataaaaaagttgataagttaaagcagaaatttgtaaattgtttaataaagtctttttcttatttaagtagagataaagattattgagcgtttgataaaaatctgttttttgaatttgacgcaagaaatttttattaggtaaatttgatgccttgatgctttcattaacgccgttgccagctaggccaatccagaaatattcccagggttcattgtggtcagcttgaaaggaacaagtttgactgcgtggaacgtaaaaaagatcgccagcttttaatttaactgcgtggtgtctactagaagtaaaggtaccagttccgctaataatgtaataaaaaatatcgtttttacgaagattgtcaccttgaaagaattcatcgggctgacatttttgtcgaccataaaacatgatgtagctatcaagattttggttatttaagttaggcatagacttcctcactgttgaaaaattatgttacttctattatagaagagattttgcttaaaaggtgaagaatgaaaaacgaccacattaagcggtcgttcgtgaatatttatagaaaattatgatatgtggaattataaaatgaaaaggtattttacttattggcaccacttcttccattgaataaaagattgagcagagttgcacagatgctggctacgacgataccgttgcctaagaacaattgaatggtttgggggagagtttggaagatttgaggatagacagtaacgcccaatcccatcccgattgaaatggcgacaattaaaatgttgcgattattttcaaaatcaactttagttaacattttgattccttgaacggcaatcatggtaaacatgactaacatagcgccgcctaagactgaatcagggatgatagtaactagagcaccgattttaggaagtaagcccatggccattaataagccagcagcccaatagatagggcgcttggttttaataccggataattgaagtaagccgacattttgagaaaaagtagtgtaagggaaggtgttgaaaagcccaccgaagatttgtgctaatccttctgcacgataaccttttttgaggtcttcttcggtgatatcttgatgaagtaggtcgccaatggcaaagaagacgccagtggattcgaccaaggaaactaaggcaatgatgatcatggtcaaacaagatgaccattcgaattcaggaacgccgaagtagaaaaattgaggtaagtggaaccaagaggcttgtgttacgggtgtaagtgaaactaatcccatgcaaccagcaatgatagtcccagcaattaatccaattaaaacagagatggagcggagaaatcccttagcccagacttcaatgacaacgatgatgaggatggtgataaaggcagcaataagattttttgcatcaccaaagtccttggcttgggcatttccgccacccatgttttgaaaggccacgggaatcaaagttagtccaattactgtaattaaggtcccagtaactactggcgggaagagttttttgatttttgaaaaccatccggcaattaagaaaacaaagattccagcaacgataatggcaccatacatggtgttaattgaaaatttttgcccgatcatttctaagggagctaccgcttgaattgcacagcccaaaacgactggcaagccaatgccgaaatatttattacggaatagttgaattaaagtggctaaaccacacatgaagatatcaatcgaaactaggtaagtcatctgtgtgctattgaagtgtagtgccgtaccaattaaaaggggaacggcaactgcaccggagtacattgccagcaaatgctgcaaacctaggacagcagcttttttgtgactaacttctttttgtgccatttttaattattcttctccctcgaagtgtacttgatcattttcaaagctatcgatttttgctagggcttcaaaacgtagaccttctttttctacccattcgcttccgccttggaaggtttttgcaacaacagcaccaactccaacaatgtcgcagccggcttgtttagcaatgttaaccatgcctttgactgcttcaccgtgggcaacgaagtcatcgatgattaagatatgttcgcctgggtgcaaaaatttctcttcaacgcagatcttattgttgaccttcttggtgtaagaaaagacgtcagcccaataaactgcatcattcaaagtagacggctttttctttctggcaaagatcattggcacgtgcagttggtaggctgccatgacaccaggagcaatcccggacgcttcacaagttaagaccttatcgactttttcatctttaaaaaggcgggcaaattcttcaccaacatgcatcattagttgcggatcaacttggtgattcaaaaatgaattaattttaagcacatttccaggtaaaacttcaccatcttgtttaattcgatctactaattccttcaatattattctcctcaagaaagaaataaggacttcttctacctaaaacaggtaaaagaagtccttaagattattcttaactttcattcacctatagtccggtatttacggtaccgggtagagactgtcgaccttatttcgacgatatatagatatttgtgttggcttaatcttaacagaatatattgccgaacacaagtggaaaattaaggattaatgttcgattatagtaaaaattattcagctgcgatatcgttatggcacagactgatgatcttttcgataatgccatataagatccccgcgattggccagatgatccagctgcgttcccaatcattggtaatgaagctatatcctagataaagtaagactgctattaaccaatagagtgtggcgtatttgttcataatcttgcgacagccggttaattggattgttaaattgcccaggtcaagcataatagctagggcagtagaaaagcaaaggatggctggactgcgaataattaaactaatggctaaagcgcgaaggctggcacttttttgagcagctgttaagtagccttgctcttgttgatcagataaaattggcaattcttcagttaagttattatctttgtggtttaattcaaaagaaggtgagccgcttttgagtaaataatcggtggtcactccaaataattctgataaagctacaattttttcaatatcgggaattgattgttcactttcccattgggatacagcttgccgactgacattcatcttttcagctagtgcttcttgaaaaagatgatttttcttgtgtaatgccgcaattttttgacctaatctcatgattgatcgtcctttcgttttgaaataatttgatttaacgaaaatttgcggttgcagaccaccactttttaattgcatttagcgcaactagtagttgcaactgctggttgctcaagataaaagccgaacaatgaatggctatttttaactttttgattgacctttttaatttttcctagtagagttagttaaaaatgcgtaattgaaaagagggagtaaatagtggctaagaatctagacgattttgataaaattattgtgcttgacttcggtagtcaatataaccaattaattacccgccgtattcgtgacttcggcatctattctgaacttttaccacacgatctttccatggagaagattaaacagatcaatcctaagggaatcattttctcaggtggtcctaacagtgtttacgataatggtgcattaaaggttgatcctgcaatctttaagttggatattccaattttgggtatttgttacgggatgcaattaatgtctcatgacttaggcggtaaagttgaacaagctgaaaacaaggaatatggccgcgccaacattacggttgaagatccagacagtattttgttcaatggcttgccttcaaagcaatacgtttggatgagtcacggtgatttggtaactcaagctccaaagggcttcgaagtaactgcctcaagcaaaaactgtccaattgctgcaattgctaatccagataaaaagttttatggcattcaattccacgcagaagtgcgcaattcagaatacggtttagacatcttgaagcactttgcttttgaggtttgtggtgctgaggctaactggaccatgaacgacttcatcgacatgaaggttgatgatattcgtaaggaagttggcgacaagaaagttatcttaggtctttcgggtggtgtagattctagcgttactgctactcttttacacaaagcaatcggcgatcaattaactgcaatttttgttgatcacggaatgctgcgtaaagacgaaggcaatcaagtaatgcaagccttgaacaaggatcttggtgttaacatcattcgggttaatgcccaaaagagattcttagacaagttgaaaggtgtaactgatcctgaaaagaagcgtaagattatcggtaaggaattcatcgaggtctttaacgaagaagctaagaagttaaaggatgtagatttcttagctcaaggtacgctttatactgatgttatcgagtcaggtaccaacactgcccaaacgattaagtcccatcacaacgttggtggtcttcctaaggacatgcatttcaagctgattgaaccactgcgtaagttgttcaaggacgaagtacgtgaacttggtgaaaagctgggcattccacatgacttagtatggcgtcagccattcccaggccctggtcttggtatccgtgttcttggtgaagtgactgaaaacaagcttaagattgtgcgtgattctgatgcgattttacgagaagaaatcaagaaggcaggtttacaagaaaagatctggcaatacttcactgttcttccaggtattcgctccgttggagtaatgggcgatggacgtacttatgactatacgattggtattcgtgccgtaacctcaattgatgggatgactgcagattttgcccaaattccatgggatgtacttggtcacatttcagatagaatcgtcaatgaagtagataacgttaaccgcgtagtttacgatgtgacgagtaagccaccttcaactattgagtgggaataatttcgtaccttaataagaagaggaaatcccaatatgacggcatttgaatagggtcaatattagtggaaagtaccggttgaaagcaagttgtctaccgaaaattgaatattttgcttacttttgttgaaaagtaagtgactgttgtcctacttattgtcatttgataagtggggcatttttttctctttgttgccacaaaagaaatgctgaaatccaaacggagcagtctgtttgatcgttgttgttacttatgacgaaaacataagtaaatcagatatgaaatctcgaaatgaccttgaatgaaatctcaaggtactcattctcgaatgcaatatctgatcggtcgcaaccgaaggctgaaaatttattttgccgggacggcaaacatgagggggtcattgcacgatgaagccgttaaaggatgagctaattcaaagtcgacttgatgaagatgaattagcagattttgataaagtgaagaaactgctcgatgtgaagagtaattctgttgcaattcggcagatgattaaagatgaaatgagaaagccagaaatgaatggaagcaaggtaatactgacgttgtatcagcgttattaaccaagctgtctgctgaaggtcgcctaccattgtcagaggcgttgatgggtattacaggtactaaaacatcatcacaattgagtatcttacaaaatcagttcgccgatattcaatcacagttagaaagtattatgtattcagtgacaaaaatggtcgattgaacaagtggctcatgtagttagaatcgcctacaagaccatctacaactggattgagcaaggagtattggatattggcgtggctgatttacctgaccatggaattcgccgccgacgagccaaagaaacccgtgggacttttagccatggacgttccattgaagatcgtcccgctgaagttattgaccgtcatacctcaggtcactttgaagcagatacagttttatctggaaagcgtaaaggtcaagcaatagctacgtttgtcgagcgtaagagtcgtcttatcatcgttaaacggcttcagggacgagatagtacctcaataaccaaggccattttagaattagctaaccagttagaagataatctcaagccccttactgttgaccatgggaaagaattcgctaactacaagctaattgaaaagcaggccaggattcccctatactttgcgcatgcttattctccacatgaatggggcagtaatgagaatcgcaaccgagtactacgacgctttatcccaaaggtcaaccgattgagaaaatcactgatgatgagttaattcaaattaactggtatttgaactccaggccactcaaatgtttaaactggcgcacactaattgagatctttttgcgtaatctgcgtcactaactttgttcaagttatttcttgcaatctgccgtttgaaaagagattagccttggcggttagtctcttttactatctggtaagttgactgcaaacagaaaaaagagccaagccgtcatcaaagtcgctaaaccgtgctataatgttgtcggatttaaaaataccactagttattaaatttgggaggcaagaataacgatgaagcaacttaaatttttagaaactaagcggacaccgcgttatagtttgcgtaagtttagcgttggtgtggcttcggtattattaggagtaaccatttttggaattaactttacaaatcattctgtaaaggcagcaaccatagaaagcgttaaaacttccaatagttcaccagagacgcaaggtagtgcaagtaacaatgcaacagctaataattctacagaagctgcgacaaccccacaatcttcaccagaaacgcaaggtagtgcaagtaacaatgcaacggctaataattctacagaagctgcgacaacctcacaatctttaccaaagacgcaaggtagcgctcacacttatattagatcattagcagcaagatcagcagcaagattagcagctacgaattttatggtaacttctggttctgacagaaatgcagcaggtacagtagatcaaaataacattaatactcagctagctaaagaaaatcaagaattggccaataaggctaatctaacttcttcagataactacagttctaatatctataaaggtacagatggaaattattacaagattgtaactatttatggtcaggactacgtttaccgtgctgctgatattcaagctagtggtgctgattttaaggggggatcctaaacaaacagctgaagatactaaaaataatatcaatatttctaaagaagatttaggaaatggtaagacccgttggaaggttgttttcttccctaataagggattacaaaatgttggcagtaaattaagtgggttaagttctgcaaaatttggtattgccctcacttctgactaccaaatcgttggtaatgttgacatgaaagtaattagtaatcctaatcaaacatttgaatcttatacatttgagcccggtagcactagcgctactgaatttccaatacaaaatctaaaaactgaaaaagacttttcatttaatcctaagacagatgttgatccaaatactggtttaattaatagtgaaaccatgccagcttataacaatcaatatttgcaaggcccatactatttcactactgctactgatgttggtgctaagaacttatggcagacttactttaaagatgctgatgaacgtaagaatgcatatgatgggtccccttatctaggtggcaatcatgactttcattttaatacttttaaaattgcaaatgaaactggagttgacggtgcaaaatataaagacccaatcatttatgacaaactggggtataggttaaattctaaaaacggtgtagctaattctaatggcgtatatagcagtgataactttaaccaagcaatgtcatttaagtcacaaggtgtcactagtaatgcacaattttcttcttatgttatttcctttactacgcaacacacagactctcatgaagtagaattaactacaggttcgaaaaatcaacaattctcaggaatcgcagctaatatttattcttatcagaattggtactatagcatgatgtctagcttatatggtgagcagagagcactggatccagctggtgcaccaaaaacacctaaagatgttatttctggttgggttgatgccactagagctctggatgagattaagaaagactatttaaataatgctcaaattaatgttttgcggaataaaattctaaataacattacagactctgatgctgtaaataacattattaaagaaggaaattccttaaacgatgctatgaaaaatcttggtaatagtatcggacagtatgatcctgatggcagttttgctgatcacaaggaagatacaacaaagaaatctgatcgctataaatacgcaagtccagataaaaaggcagcttatgacaatgcaactgaagtaactaaagctttgattaacaaagatacaggtacctatgcagatcaagcgacggtagaacagcttactaaagatgaaaatgatgcttggaacgaacttaatggtgtcaagccaaaggataatgaggttaactctccggtcggtggtaccattactattgaaaagggacatgcattagattcaactgatgccgctaatgcaattaccaataaggatagtttgactaatgtaaaaagttattcttggtcgggtactccagatacaagtaagccaggatctattagtccaaaagtaatagttacatataatgatgatagtgctgatgaagtacctgtaactgttaaaataaaaggcgatgctgacaagtacaagagactgtaaaatagtttgtgtaaggatgaatgattccttaaatttatttctttaaacattagaaaaaggagttcctttctcgtatgattggtttgaacaaaaaaacacatacagaaagaagaactccttcatgaatgattttaccaaagattttgctcaagctctattcaatccagacaaaataaatgatttattgcgcaaagagctacaacaggctgttaataacttgttagaagctgaattgaccgcctttctgggctatgatccctatgccagaaatggctggaatactggcaactctagaaatggtgcttatttccgcaaagttgatacgcaatttggcccaattgaagtgcaagtgcctcgggatcgcaacggtcaatttcatcagcacacgctgcctgactacaagcagcactcggatatcttggaaagcatgattatcaagctttactccaagggcgtgaccaccagggacatagccgatctaattgaaaagatgtatggcagccattacagtccagctcaggtatcaaatatttccaagcagatgattccaaaggttgaggcttaccacaaacgcaagctaagcgacaagtttttctgcgtctatttggatgcgacataccttcctttgcgccgagaaacatttgagcgtgaagcagtctatattgccattggcatcaagcctaatgggcacaaggaggtcattgactactgcattgcacctagcgagaacattgaagtctggacagatatgcttcaaaacatgaaatcccgaggcttaaagcaagttgagctttttctttctgatggtgttgttggcatgaaaacagccttggccaggacttatcctaaagctcattttcaacgctgtttggttcatgtcatgcgcaatatctgcgctaaagtacgcgtcgacgatcgtgaaaagatcatgaacgaattcaaacaggtgcatcaacagacaaacaaagaagaagccacagctgtcctgcatgacttctataccaaatggggcaaggtttacagccatgttatcagaagcttgaaagacatagaaccagatctgctggtcttttataactatcccaagcagatcagagcttcaatttattcgactaacatgattgaatcatttaacaatgtgatcaagcgcaaagctaagcctaaggcagagtttccaactgaacagtcgcttgatgcttttattggcattcaggcaatgagctacaatgaccgttatttcaatcgaattcataaaggctttggtcaggttcaggacaccttagaatcctactttgattaaataaataattaaaaaatcaatttacgagaaagatctatttacacaaaagatttgacagtttctgatatagtacctgttaagattaatgttaaaaaagatgcagaaagctacactgtaactcctaataatgaagtttcagttgataagggagaagatgtagatccagctagcttagtaacagtaaccgatccagatggcaagcaagtacaactaccagcaggttcaattgactggaaggatggcgcaaagcctgacttgactactccaggtgataaaactggtagtgttgaagttaccttcctagatggatctaagaaagacactgatgttacaattcatgtaaagactgatgcagaaacttatgatccacaagcccaaccttggactacaactgttggcaaaacgcctaaggctgatgaagtaatttcaagcactgataagaatggtaagaagatgccaagtgatgcaaaatacacttggaagactgaaccagacacaagtaaaactggtgaggcatctggtgtagtaaaagtaacttacagtgatgaaagccaagatgaagttcctgtaactattaacgtcaaggataagctagatgacaaggaaaagtaccacatctatggcaaagatggtcttaaggtagataagaacggtacattagctccacaagatgctatcgatgtaaaggatgctgatggtaataagactactttaccagaaaactcaatagtagaatggactaagaaacctgactttagtcaagctggtaaggatgtaactggcgaagtaactgtaacttatccagatccagatcacagcaaatctgatccagtaactgtaactgttcatgttaatggtaaaagtgatgaatacaaggttgcacctagagatggtgtaactgttccaagaggtagccaagttgatccagaaagaacagttgttgctcaaactccagatggtcaaccagctagtttcccagatggaactacacataaatgggtaactccccctgatacttcaacaactggtaatcgtacaggtgtagttgaaactactttcccagatggttcaactactagaactacagtcactgtaaaggttcagccaaatcaaagtgataaatatgatccacatggaccagagaatccagatgatagagtcccagtaaaaaatccagaccacttaactggtggtgataaggataatgttaagggtgaagttggcaaagtaaatccagatcttccaaaggatacagaagttacagtcgatgataagggtaacgcaacgattatctactcagatggttcaaaggataaaatcccaggtggggatttggtacgtccagaaaaagacgctgataaaaatgatccaaaaggtccaaagaacccagatgatagagtcccagtaaaagatccagaccacttaactgatggtgataaggataaggttaaggatgaaatcggcaaagaaaatccagatctgccaggtacgattgatgtcgatgataagggtaatgcaacgattacctacccagatggttcaaaggatacaatcccaggtggagatttggtacgtcaagaagataaggacaagtatgatccaaaaggcccaaagagcccagatgatagagtcccagtaaaagatccagaccacttaactgatggtgataaggataaggttaagggtgaagtcggcacagtaaatccagatcttccaaagggtacagaagttacagtaggcgatgacggtacagcaacaataaaatacccagatggttcaaaggataaaatcccaggtggggatttggtacgtccagaaaacgacgcagataaatacgatccaaaaggaccaaagaacccagatgatagagtcccagtaaaagatccagaccacttaactgatggtgataaggataaggttaagggtgaagtcggcatagtaaacccagatcttccaaagggtacagaagttacagtcgatgataagggtaatgcaacgattacttacccagatggttcaaaggataaaatcccaggtggggatttggtacgtccagaaaacgacgctgacaggcatgatccacatggaccagagaatccagatgatagagtcccagtaaaagatccagaccagttaactgatggtgataaggataaggttaagggtgaagtcggcacagtaaatccagatcttccaaagggtacagaagttgcagttggcgatgacggtacagcaacaataaaatacccagatggttcaaaggataaaatcccaggtggggatttggtacgtccagaaaacgacgcagataaatacgatccaaaaggaccaaagaacccagacgacagagtaccagtaaaagatccagaacacttaactaaagatgacaaggataaggttaaggatgaggtcggcaaagtaaatccagatctgccaggtacgattgatgtcgatgacaagggtaacgcaacgattacctacccagatggttcaaaggatacaatcccaggtggagatttggtacgtccagaaaacgacgctgacaatatcacaccaaatattccaggcgataaagttacagtcaaggacccaagtcatttaactgatgatgaaaagaatcaagttaagaacaacgtcgataatgctaacaaggataagttcccagcaggcacagttattacagtaggcgatgatggtacagcaacaattacctacccagatacgtcaactgatacaatccctggtgataaattagttaagggtgaagatagcggctcaacttcaggacaaacagacgctggcaatatcacaccaaatattccaggcgacaaagtaacagtcaaggatccaagtcacttaactgatgatgaaaagaatcaagttaagaataatgtcgataatgctaacaaggataagttcccagcaggcactgaagttatagtaggcaatgatggtacagcaacaattacctacccagatggttcacaagacatcataccaggtgaccaattagttcaaggccaaaagggcgacacaactgatgctggtaacattacgccaactattccaggtggcaaggtaactgttaaggacccaagtcacttaactgatgatgaaaagaatcaggttaaggataacgttgataatgccaacaaggataagttcccagcaggcactgaagttacagtaggcgatgatggtacagcaacgattaaatacccagatggttcacaagacaccataccaggtgaccaattagttcaaggccaaaagggcgacacaactgatgctggtaacattacgccaactattccaggtggcaaggtaactgttaaggatccaagtcacttaactgatgatgaaaagaatcaagttaagaacaacgtcgataatgccaacaaggataagttcccagcaggcacagttattacagtaggcgatgatggtacaactacagtaacttacccagatggttcaaaggatgtcattgctggtactgatttagtcatcgctgctaaaagcgaagatgttcctggaagcaagcatcattcacataagaatggttcaaactctagtcaagctgatggagttaagggagcttctactgctaatggcagcatcgcaaacgctggtaacaacctaggtgttaagggtgaaagtgataatgccattggtaataacaaggctactagcttaaagacattaccacaaacaggcactaaagatacttcaattttgggtgtgcttggtatgcttttagcttcacttggtctattcgtatttaagaagaagcgcgataaagaataatttataatagttttttataaattctattggtaaaagtatctagagaaagttaattctcagatttaaaaagacgatcgaaaacttttgaaaaattgtttttgatcgcctttttgtgtgaaatgaaaacaagattctacgtaagcgtaaaataaccgagtatctagattagttttagatttcaattatgattaatttatcaatattttggaggttattcatatgtcagaaaaaaagctaatcgtccctcttgttcgtgagccaaaagctaaaaagtctaagccagctcgtaatcatttactgctttctttaaagaaaaatgacctagaattagacttccaatgtcattaagttaagctattgacttttgaaaactgatctttttaggaatcgaatcatttggattcgattcttttttttgcaaaaataaaggcgaaaagacaaacgaaatttaaaagccaagtctgcagtatattacatgtatcgcgtggcctaattaaaaaagaaatacaaactacgcttatttagcatacgcaaaaaagcatcaaattggctatctaaagccaaatgatgctttaattgtttttttctccaatgtcaatagcttaacttaatgacattgattaaatttgcgggctttatttatttttatattgccaacccaacaagcgagaaaataatttcactaattagtactaatagaacatttactaagatgcctgtaaaggttgattctttatgtggattttttacgaaagtcttagttgtgtggtaaacaagcggaatagtaagtaaactccctaaagtaataactggcaaatattttaatactattaccaatattaaaaagatgtaggctaatacatagtaacaacataaaatagtcagggcagtttttcgacctgtatagtagggcaaggttttacgtccgattttgacatcttcagtcacatcgcagatgttgttggctaacatgacattggcaatgacaaaaattgccggtccagcaacgataatggctttagcccagaaaaaattatcgaagggatgcacgttatacatgttgatatataggcctaaaaatgtaatgttgtagcccattgtaattcctgaagctggttcaccaaaaggagtttttaaaatggggtaagggccacctgagtagcaatagccgattagatagcttaaaatcccgattaataaaataatccaaccgactttaatgctaaggatagttccgataattgcagaaattaacgtcaaaataatgattatttttcgagcccagcttttcgtaatattaaatttctctaggatattgttgtagctagttatatggttttgcttataacgtgcgtaatctgtgtattgattatgaccattaactgctaaatgaaagcaaatcacagctaaaaatagccataatgaatagactagattaaagttgtgataatagtagctagccatcaccgagccgataatatatggcagagccgagataataattgtttggatttggaccaaggcattgaatttttgtagtgtagaatattttttcattggttcctccataagtattaaatagccattatcttcagtataaatagatagttataatttacaattatcttgggtagaaatcttattgtttagaattaagaaagcctaatattattttttgtggtggtcgatgtaagtcagtaaagccaacaaaagcatcaaaaagctactctcgtaaaccgacatggttgaactctttctgtagtatgttgaccattgttaaaaaaggtgaacgcgtaaaatactaaatttttactctaacaaagtgtctgggaaaaagtttatttttaattaattttagactttcactcaaaaaaatcctaataaatcaaggtttattgataccaagatttattaggatttcttaatttctgagtttttcccagacactttatttagactattttcttaacttgtgcaccttatgggctagaaccatttctttattgcgatcttcatagatcatatccttgatgtaattccatgggattaacaaaggcgttttgctatttttacggaaaatgaagtctgcgtgtcgtctttccaagtgacgcaaatatcttttagcattttgaatcttagtatggtgttccaaatgcaatcgtggttcgaaatcgacgattttgtgttcagcgttgaaaataggtctaactttatggtgccagttctcagcactagagatatgatcgctgaccttttttccggcttctacgatattctctttggttgctggacttttctgatccttaaactccgcatgtggatctagatagtagttgcccaaaccatcttgacgataaagtcgtattttcttgaatgtcttatttttcttatccattcttacttcgataacgtcaccatttttgtgattcattaaatacatgtgatgttttctagtgtaatttgcacttttcatgatcagaaatctcacctctacattaattattctgaaacgatattataccagtattttaactatatttttgctttacgagtataaaagtttataatttttaaaaagaaatttcaattcttgagaattagggaaggaaaaaatcctaatgaagaaacttaatatattttattatgctaccatttggagttttattattgaaactgtcaaatcttttgtgtaaatagatctttctcgtaaattgattttttaattatttatttaatcaaagtaggattctaaggtgtcctgaacctgaccaaagcctttatgaattcgattgaaataacggtcattgtagctcattgcctgaatgccaataaaagcatcaagcgactgttcagttggaaactctgccttaggcttagctttgcgcttgatcacattgttaaatgattcaatcatgttagtcgaataaattgaagctctgatctgcttgggatagttataaaagaccagcagatctggttctatgtctttcaagcttctgataacatggctgtaaaccttgccccatttggtatagaagtcatgcaggacagctgtggcttcttctttgtttgtctgttgatgcacctgtttgaattcgttcatgatcttttcacgatcgtcgacgcgtactttagcgcagatattgcgcatgacatgaaccaaacagcgttgaaaatgagctttaggataagtcctggccaaggctgttttcatgccaacaacaccatcagaaagaaaaagctcaacttgctttaagcctcgggatttcatgttttgaagcatatctgtccagacttcaatgttctcgctaggcgcaatgcagtagtcaatgacctccttgtgcccattaggcttgatgccaatggcaatatagactgcttcacgctcaaatgtttctcggcgcaaaggaaggtatgtcgcatccaaatagacgcagaaaaacttgtcgcttagcttgcgtttgtggtaagcctcaacctttggaatcatctgcttggaaatatttgatacctgagctggactgtaatggctgccatacatcttttcaattagatcggctatttccctggtggtcacgcccttggagtaaagcttgataatcatgctttccaagatatccgagtgctgcttgtagccaggcagcgtgtgctgatgaaattgaccgttgcgatcccgaggcacttgcacttcaattgggccaaattgcgtatcaactttgcggaaataagcaccatttctagagttgccagtattccagccatttctggcatagggatcatagcccagaaaggcagtcaattcagcttctaacaagttattaacagcctgttgtagctctttgcgcaataaatcatttattttgtctggattgaatagagcttgagcaaaatctttggtaaaatcattcatgaaggagttcttctttctgtatgtgtttttttgttcaaaccaatcatacgagaaaggaactcctttttctaatgtttaaagaaataaatttaaggaatcattcatccttacacaaactattttacagtctcttattattggaatatgctgtgctacatatttaaacttaattaattttattattaattttgtctggcatgttttgtttgataaattacctgttcctagtcaggttttaccgttttttatttgtattccttttggtttcattattggtatattaattaagcgtttaggatcatatccattaactatcgaagaagttttaatgagtgttaagcaggagggaaagatcaattatcacaattggtggaaatctttaaccttaggtcttatttctttagccgcgggtggcagtattggaccagaggcttcaactactgtactaggaagtggcatggttaattggctgggagatagattacgactaattgcttattcttctgattggaaatggaatcatttttgggatactatcgtttcgaaaaaacaactaaaaaaactgccaaaatttagtagcctttttaaacctgaattgtcaaattaagtgcaacagttaggttatgaagagatatattgcttgaagagttcctctgctgtgtgatattggaggattcggcgatatttgtggttaatggcatcagttgcctgttgaacataagcttttgacttgtctttcatgctcttgcccttagggaagaattgacgcaaaagaccattgcagttctcattggtgcccctttcccatggagaatatgggtgagcaaagtaaatctggcagcccttgatcttggtcatatccgcaaactcagagccattgtcaaacgtgattgatttaaaccaggcaggatgtctgtcaatctccttttgaagcagcctttggcatgtgcttgcccgatagtcaggaatcttgataactacttcaaagcgtgtggttctttcagtcaaagtcattaaagcaggctgattcttgcgtctgacgcctttaaccagatctccttcccagtgcagcggagcttttctgtcttcaatctctttaggacgctgttcaatggaattgccaagatgcttcttgtgcaaagcgtgaccgccatggctgtgatgacgcttgttcctgcgtcttttgagcttcataggcagatcaatattgcttatgtccagcaagccctgatcaatatagcgatagacggttggtgtgctgggacaagggtagcctggcatagtccttttgaattcaccaacgaactcatcgatgctggtggcatcaaatttagctttaaagcgtctggagagcattctcaaaaagacagcataatgcttcaatggattgcgctgatagcagtttttgcgacgcttctcataataaatctgtgcagtatcagcgtaatagtgctcatacaataaatagctgctgtctctttgcaggacacttccgcgtttgatttcgcgactgattgtcgacttatggcagccgacttcttgagcgataacagtacgggaagttatgccggaatccagcattgcttgaatttgtccacgttgtacgctggttaattgatgatagtgcttagaaatgctagaatttgaattggtcataaagatcttcctttcttgatttttcgtcacttcaagtttaggtcttcatggcctttttgtttaacacttagtgttgcacttcaattttaaatccgggtagcctttttaaatcaaaattgcatcaaaaagttttttgcttaattatggttatgatcggcgtggttggtgcagcaatagtctttaaattattccctgaagaaggattatttggtattcatcatcgccatattctctggcaatggcactatagtatgtatgtaattattccattgattgtaggttggagcttcggtatgtttttcttatggagcgaaaaatggagtgattattttgctgaaaaaattactatttcaccgattattaaagcaactatatggggaatagttcttgcattacttaccttaattactagttatgccttgtattctggtgaatttcaaattgttccatttgtacaccaggcgttgcaaatatcaccattatttttgctagttatagcagtcatcaaaaccttgtctactaatataggttttagtttaggctggcgtggtggaaaaattttcccttcgatttttgctagtgtagcagttggcgcagcgattgcgcaatttttaccaattatgccagttatgtgtgtagccattacagttagtgcaagtattgcagttatcttgggtaaacctttattaacagctattttattgattctgttattaccaatagaattggctcctgtcattttagtaagtgcgtatttagctgcctgtttaacaaaagtgagctatagttttagacaaaagaataattagggaggtatttttatgaacgaaaaaaacgatgcagtaactggtgcttctttgatagagaatcaagaagaaaaagtaaaaagcccatggccgggtcctaaaggtatgattcctgtaacaagtgggcgtgctgacgatgctaatgtacataatcgtgcctacttagacaatatcttggtggagatgcgtttgcttgattcagttgagccagacttaacaactgagatttttggtaaaaaatatgcctcacctttaactctggctgcagtctctcatttgaacaaggttttaccagataagacacgtaagccaatgcaagaaaaggcacgtgcggctaagaataccaatactttaaattggattggtatggagtcaaacgaagaatatgccgaaattgtcaaagagagcggcgatacagttagaattatgaagccttacgcagaccatgataaaattatgggcgaactaaaacaagcagaagaattaggtgccgtagctgttggaatggatattgatcatgtgcctggtgataatggtaaatatgatgtagtcgatggtattccactaggaccgatttcatttagcgatcttgaaaagtatgttcatgcagttaaactgccgtttgtggctaagggcgtgctatccgtgcgtgatgccgttaaggctagagatgctggtgccaaggcaatagttgtttcacatcaccacggccgcgttccatttggcgtgccaccactaaaagttttgccagcaatcaagcaagcactaaatggcagtagaatgaccatttttgtagatggatcattgatgacaggctacgatgcatacaaggctttggcattaggcgcagatgctgtactgattggtcgagggattctttctgaattgttaaaagatgggcaaaaagcaacagaagataagattaagaaaatgaatgagcagcttgcacaaatgatgttgtatactggcgttagagatactaaatcatttgatcctagtgtgttacattttgattaggatagaaaaatgaaatagtttattttttacagtttactataattaagtggctattagcctataataaaggcgtttaaagctatactgaatagtgttatgcttaactcggacgttgttataaggtaattatttaaaagtaattagttgtatacgaaaacatgcttagctctggtaaaagctaagcatgatgtctcataatattgagccgcttgtagattatactacaagcggttttattttagatgaaaataacaagtatttcaaaaagtgagtatctatgttttgctattatggaaatggattgatttagaaaatgatgctattgaaatttcattatgagcggggatgcaaaaccttttttaaaaagcataagaatgagcaaaagataattaagcagttaatcgatcaagcgattactaaggaattggcaactggtatgactaaagtgaagatcgctgcaatgactcggattgaggaaaaatcaatttacgagtttcgcctaaatttgaaaaaagagggttcagcgagagtcgcttttgcagtaaaggatgagcaagtactagttcttttgattacctctaatttacagaaggatagttttagtcatgaattagaaactgttctgaaaggaagtcattatgcgtttaattccaattaagcaggcagagactttgctcaaaaaaatgtgtagtaataaaagtaaatatgtagaaattaaattattaacggcaaaaaaggatcgttcaattagtgtgaaaaatgatggtaaaaagctaattttaactgaagatggctatttgaactttacgcaggaatatgaattgactgatccagctgttggccgtcatgcagttttagcggcttttaaaaaggaatttccgcgtagtaatcgtgcgtatctgattgctaaatggtatactttaactataagaaaaactatcagtgttgatcagaaaggaagtctttttatcaatgaaatatgcagaaaaatctcccgcattatgggatgccattcatcatgaagaacagcgccaacaagacaccatcgaattaattgcctctgaaaatattgtttctgatgcagttcgtgaagcacaaggttctgttttaactaacaagtatgctgaaggatatcctggtcggcgttattacggcggttgtcaatatattgatcaagttgagcaactggctattgattatgcaaaaaaattgtttaacgcaaagtttgctaatgtgcagccacactctggatcacaggctaacatggcagtttatcaagcacttttgaagccaggtgatgtcattttaggtatgggaatggatgctggcggtcacttgactcatggatccaaggttaacttcagtggtaaggaatataagtcttacagttacggcctaaatgttgagactgaagaactagattttgatgccattcgtgaaattgctcttaaggttaaacctaagttaattgtagccggtgcttctgcgtacagccgcatcattgattggcaaaagttccgtgaaattgcagatgaagttggggcatacttaatggttgatatggctcatattgctggcttagtagcaaccggtcaacatccaagtcctgttccagtagctgatgtagtaactacaactacacataagaccttgcgtggccctcgtggtgggatgattttgtccaacaatttagaaattggtaagaaaatcaattccgctttgttcccaggcattcaaggtgggccacttgagcatgtcatcgcaggtaaggcgcaagcattttatgaggacttgcaaccacaatttacagattatattaagcaagtcattaaaaatgctaaggcaatggcagaaacttttgctgaatcggacaatattcgtgtcgtatctggtggtactgataaccatttgatgattatcgatattactaagacgggtattaccggtaaagatgctcaaaatttactcgactttgttcacatcactaccaacaaagaatcaattccaggcgatcaacgttcaccatttgttactagtgggttgcggattggtacgccagcaattactagtcgtggctttgatgaagtagatgctaagaagactgcggaaatgattattgaaattttatctgatccagaaaattccgcaacgattgctcatgttaaagaagaagttcaggcattaactaaaaaacatccaattgaataatttgtgtagcagaatttagccgtactagttctcagctgggggcggcttttgttataataaaaaattaaaaataatggagttaagagtgaaggaaacgtgattatttggaaaaattaaaaagacataaaataggcttattttcagcgattatgctggccttgaattccttaattggttcggggtggctttttggttcaggttctgcagcacaaattgcaggtccagccgcaattttatcttggattttaggtgcagtaattatcatctcaattgcattgacttatgtagaattaggttcgatgtttcccgaaagtggcgggatgagtcgatacgctcaatatagtcatgggccgttattgggctttgtggctgcttgggctaactggatttcactagtcacattggtaccgatggaagccgtagctgccgtgcaatatatgagttcttggccctggagctgggctaactggactaaaaattttattaaaaacggcagtattacttttgctggcttaggtgtggttattatttttatgctgatttttacaatgatcaatttttggtcagttaaaatcatgacccattttaccaatttgatttctatttttaagatcttattgcctactttgacgattacagttttaattgcttcaggttttcatggacaaaactttggcagtaatttacatgaatttatgccttatggtagtcggtccatctttgaagcaacttctgtttcaggaattatcatgtcctatgatgcctttcagacggtcatcaatatgggtggggaattgaaaaatccgcgtaagaatattgtgcgtggggtattgatttcaatgttaattactgcggcaatctacattatgttgcaagtgacttttattggtgcagttgagccaggcatgttagctaaagtaggctggcatggagttaactttacctcaccatttgcggacatcgctattattttaggcatcaattggttagtaattttgctctacctagatgcatttgtttcaccatttggaacaggggtagcatttgtagctacggcctcaagagccctagcggcaatgacacacacacgtcatttgccaaaatggttaggtagattgaatcaaaaatacttaataccacgttatgcgatgattgctgactttgttttggcggttattttagtaagcttatttagaaactggaatttactagcaacagtaatcacggcctcaactttgattgcatatttgactggtccagttacggtaatgactctaagaaagaaaagaccagatcttgatcgtccatttaatcctggttatatgaagtggctagctccagttacctttatactaactagtttggcaatttactggtcaatgtggccaacgactattcaggtgataattgttattgccttgggtttgccgatttatttttattatgaaattcactaccaacattcaaatttaaaagaacaattacatagtagttggtggatgatcggttatttgatttttatgtcacttatgtcctttgtgggcagtagcggttttggtggtcagaactggattaagtatccatttgactttgtagtaattatcattatttctctcgccttctattattggggaattaagacagggttaaagaaaatcgatccttatgctgaaaaaattgcgcaaaataaagaataagtaaaaaaactgttgggatttttggtctcaacagttttttgttcgctattctgcttcatcaagatacttatttagtaccttgaaaacaccgttgtcgttattagtaggtgcaataaatttagcagtctttttaacgatatcttgaccattagccatggcataacttaaaccagcaaatttcaacatttcaaggtcattttcaccatcaccgaaggcaattaattcacttcttggcacgtctaaataagctaaaaattcctttagccctgcggctttatttacaccttcaggaataatatccatgtagctccaaccactagttgtgacgtggattttttctgtactacggctgttgaagccatgttctaattcatgtcgaatcttgctgggatagtccattgtgatcttagtgtattggtcatcagcaggaattttattaaaatcatcaatttcgatgctattaggataaaaataatgatgggaccgcttgtattctggtggtgtactttttaaaaagtaggagtgcttaacgccactgattaaaatgttttgggctgcaccaggatagcgtgcgtgcaaatattcaataaaatttaggatgcatttttttgaaaagcttgttgtacgaataatttttccatcgcgaactaagaccgcaccattgtcggcaacaaagtcaatagaatcgataaattcgctaaagtcatcagccaaacgaccagctgggcggccgctagcaataataaaatgtgccccgtgttgatgcagacgagttaaaatctcgctaaacatttgatgatcgtattgtttttcatcgttaacaaaagtaccgtcaacgtctacagcaacggccttgaagggaagagtagtcatctaattacctcactaaaatttgataccgttaacagtttaccatttcttgcaagtgcttacacaaattatttatattatgtttaacaataaatttgaaatttacgaggtagaaaaaatgacaccatggtggaaaaaagcagttgtttatcaaatttatcctaagtcatttcaggacagcaacggtgatagcataggtgacttacaaggaattattgctcgtttagattatttggaaaatctaggagttgatgcaatttggctttcaccggtctatcaatctcccggtgtggataatggctatgatatttcaaattatgaagcgattgatccgcaatatggcacgatggctgatatggatgagttgattcagaaagctaaggagcatcatatccgaattgtaatggatctggtggttaatcatacatctgaccagcatcaatggtttgtggaggcacgaaaaagtaaggataatccttaccgagactattatatttggcgtgatcctgttgatggacatgagcccaatagtttgaagtctgctttttctggttcagcttggaaatttgatgagcaaacaggacaatattatttacacttctttgcggaacaacaacctgatttaaattggaaaaatccagagttgcggcaaaaaatctacgatatgatgaacttttggcttgataaggggatcggtggcttccgaatggatgtgattgaattaattggtaaagatcccgacaaaatgatccgtgaaaatggtccgatgcttcatccatatttgcaagaaatgaacaagaatacatttggtgatcgagatgtgatgacggtgggcgaaacttggaatgcgacaccgaagattgcagaagagtactcagatccagcacgtcatgaattatcaatggttttccaatttgagaatcaagctttagaccagcaggagggaaaagaaaagtgggatttaaagccgctagacttaggcgaattgaaaaaggttttagtaaagtggcagacagagcttgattttaatcatgcttggaatagtttgttctgggaaaatcatgatattccgcgcgtaatttcacgttggggcaatgataaaaaatatcgggtgcagtgtgctaagatgtttgcgacagttttacatttgatgcacggcacaccatatatttttaacggtgaagaaattggtatgactaattgtccggtaaaaaatattgatgaagtagaagatattgaaagtgtcaatatgtatcatgaacgtctggctgaaggttatgacaaagataaactaattcatgcgatcaatgttaaaggcacggataatgctcgtcgtccaatgcaatggaatgatgagaaaaatgccggctttactaagtcaaagccatggttgacagtaaatcctaactacaaagaaattaatgtgaagaaggccttggctgatcctaattcgattttttatacttaccaagaattgattactttacgtcatgaaaatgagattgtggttaatggtgactttaagttggttcatgatactggtgatgaagttcttgcatattatcgtattttaggtactgaaaagtggttggtggttgctaacctatctggtgaagagcaacagtttacgtcgaccgatcgcattaaagaaaacttgcttagtaattatgctgtgcgtaatgatctgcatgatattacgcttaagccttatgaagcatttgcagtggcaattaaataagctaaaattaaaaagaacttgaattactaacttgaagatgttattctagttatcgttaatcgattaatctatgatctgtgatatgatcatggcaaaggagtaataaattatgaaacaaggtattcatccagaatttcaagaagtagttttcatggactcagcaactggtgctaagttcttagctggctcaactttgaagccatcagaaactattgactacgaaggcgaaacttacccattagtacgtgttgaagtttcatcagattcacacccattctacactggcaagcaaaagtttgctcaagcagatggtcgaatcgaaaagttcaacaagaagtacggtttgaagaagtaaaccttttatctggtggaagcagtcccattggggctgcttttttcgttagagattatttggcagaatgcatgaaagacagtataatgttttctgtataaaaatgtttttatgggagtaaatattcaatgaaaatgcaaatggcggaaattgccaaggctttaaatactacttgtgaaggtgacaatcaaactgttattacttctgttgcctttgactccagaaagatcacagatggtggattatttgtaccacttgaaggtgaacgtgatgggcacgaattcatagctagtgctattaataatggtgcttctgctactttatggaaaaaggggcatccgaacaagccagaagatattgcggttattgaagttgatgatccgcttgctgctatgcaagagcttgctcgctattatttgcgtaaggttaatccaaccgtagtgggaattactggttcaaatggtaagactactaccaaggatatgattgctgctgttttgtctaaacgctttaatgtacataaaactcaggccaactttaacaatgagattggtgtgccaatgaccatccttgagatgaagccaaatactgaaattttggtgcttgaaatgggaatggacagaccaggtcaattgcatcatttaagtgaattaacccatccagatgtggccgtaattacaatgattggtgaagctcatattgaattctttggcagccgcgacaagattgcagatgctaagatggaaattactgactttttgcgtgaagatggcgaatttatcttcaatggggatgaaccattattgcaagaacgtgctgagaaattggatcaagctaaagcaacttttggttttagagatgaagatacagttcatgcaactggctttaagagttatatgcatcatgctacctttacagttaatgattcagagcaaaaattctcaatcccaatgattggtaaacacaatgtttctaacgcaatggccgcaattagtgttggtcgtcattttggtgaaagtgatgaggaaattgcctcatcattgtctaactttaccccaacggctaatcggatggagtgggaaaaaggcgatgctggagaaagcatcatgagtgatatctataactcaaatccaactgctgttagagctgtattgactagttttggccaagttgaagtaaaagataatgggcgcagaattgctgttttaggtgatatgttggaattaggtaaaaactcccctgaattgcatgctggccttgaggatacgttagatccacaaattattaacgaagtttacttatatggctctgaaatgaagaatttgtatgatgctttacaagataagtatgagccagagcatttgcattattatacacaagaacagacagatcgaatgattgacgatctgaagaatgatattaagtcggatgacattgttgtattgaagggttcacatggaatgcacctggaaaatgtcttggcccgactaagataggagaacaatttttttgaagttttcagaattaggattaaatgacgcgcttcttaaggcaattaaacgttcaggctttgaagaagcaacgccaatccaggaacagactattccccttgctttgcaaggcaaagatgtaattggtcaagcccagactggtactggtaagacagctgcgtttggcttgccaattttacagatgatcgacaaaaaagaaaaagcaattcaagcggttattattgaaccaacgcgtgaacttgctattcagacgcaagaagaattattccgtttaggtcgtgacgaacatgctcatgttcaagtggtctatggtggagctgatattggtcgtcaaattcgctcattgaaacaccatgtaccatcaattttagttggtacgccagggcgtttgcttgaccacttgaaacgcaaaactattaatttagatcaagttaaggctgtcgttctagatgaagcagatgaaatgctcgatatgggttttattcaagatatcgaaagtattttgaaatatgctaagaaccgacaacagactttactctttagtgctacaatgcctaagccaattttgcggataggcgaaaaatttatggatcacccagaaattgtccgcattaaagctaaggaattaactgctgatttgattgaacaatattttgttcgtgctaaagagtctgaaaaatttgatattatgtgtcgactaattgacgtgcagggtccagatttggctttagtctttggtcgcaccaaacgtcgcgtagatgaacttacgcgcggtttgcaagcgcgtggctacaatgcggcgggaattcacggtgatctatcgcaagcgcgtagaatgtcagttttgaaaagatttcgtgaaggtaagctagatattctggttgctactgatgtagctgcccgcggacttgatatttcaggcgtaacccacgtttataattatgatattccccaagatccggattcatatgttcaccgtattggtagaactggtcgtgcggggcaaaatggaatctctgttacttttgttacgccaaacgagattggctatatgagaaccattgagcaattgactaaaaagaagatgtcgccgcttcgtccgccaacagatgatcaggcattacatggtcaattaaagcaagcaaaaattgaaattgaagatttgatgaacggtgatttgggtaaatatacccaaggggcaagtgagctgctggataactattcagctctcgacttagttgcagcctttttaaagaacttggctaaagatgaggttaaagtcaagattaccccagaaaagccgttaccatacaagggtgatggtcgccgccgtcgtggtaaaggtcatggccgtagcaataataatcatggacgcgataaccaccgccgtcgtaacaataattcataccgccaaaatggaaaccgcggtaagcgtggtcgtggcaacggacatgaatttgtaatcaagaataagaaagattaagattttatcttaaaaagggaagttgtaatttttacagcttcttttttgtattataatgatgtcattgtgtgaggtgaaaataatgattaaaggagtaggaattgactcgattgaagttgaacgagttaagaagatcgtggacaagggggatgcttttgccaaaaaagtattaactcccaaagaatttgatcaatatcaaaaaatggcaggcaaacgtaaagttgaatacctaggcggacgcttttcattaaaggaatctttttctaaagcaatgagaacgggtctgggaaagtatattggttttcaagatgtcgaaactttatgggatgatttaggtcatcccgttatgacttcaactaagtttgatggaaatattttcccaagtatcacacatgataatcatgaaattattacatttgtagttttggaggaaaaataaaaatatggttccaggctatcaccgtccagccgttgtaaaggtaaatttgggcgcaattagaagaaatataaaaaacgaaatgaaacatcttgcaacagggcaaaagatgttagctgtagttaaggccaatgcttatggtcatggtgcagttgaggtggctaaaattgcgattgaggaaggtgcagcaggcctttgtgtagctattttagatgaggccttgcaattgcgtcatgctgacattgttaagccaattttagttttgggagtagtttctccagaatacgctccaattgcggccgcaaacaatgtttcattaacgattcctaaccttgaatggctaaaggaagcagaaaagtaccttgaaaaagagcagttacagttgaaagttcatattggagtagattcaggcatgggtcggatcggctttaacgaagatgaggattttattgctgctaataaattcttacaaaataacgataatttctacgtagagggtatgttcgcacactttgcttccgcagacagtgctgatgatacttactttaagcatcaggtagaaaaatttgctcatatgagaagtttgttgacagttaagcctaagtggattcacgtagacaataccgctgccagcatctttaacaaggatgtgcctagtgattgtgttcgttttggaattggcatttatggtttgaacccatcctctaatcctgatagtcctgacttgaagtcatcaatttcgcttgaaccagcattatcatttgagagtgaactaactcatgtaaaaactattcatgaaggtgacggagtaggatatggttctacctttgtagctgatcaagatacaattattggaactgtgcctgttggttatgctgatggctttattagaaagtttcaaggctttaaagttaaagttggagacgaatactgtccaattgtcggccgaatttgtatggatcaatttatggtcaaaatgccaaagaaaatgccgttaggaactaaggtggtcatcatttccaatgatccaacagcgccaaataatattaaggccgccgcagattatgttgatactattcactatgaagtagcatgtttgttaaacgatcgtttacctcgtgtttactatgaaaaataagttaggcaataaaaaaatgcttctagaacaaaaatctagaagcattttttggtagatcagttttttaatccttaacagggtgttcaataaagacacctggattttcatcactcataatagtcatgccggcttgcaaatcttcgatttcagaaactacgaaaccttttctttgtaacttatcaacaatcgttctcatggtaatatctgagacaccagcggggagagtaaagagtgttcttctaacaaaattaccttcgagttcgccagcagctgcatcaagtgtcattacactagacatattagtgtgcttagacacaatcttggacatcttgatcaagttaccacgtgtattgtcagataaaacggtcaaaacgtatgaaccatttttaacatcccacgcatctgacaacatatcaagcattcttgagtgagtaagaataccataaaaatgattatcttcatcaaggacagcaatataaggtaagtccttaatgttgaaaaataccttgaagaatggtgaattgaccttaattgtcttagtggcattcttaagtaagtaagttactggtagattcatatcgccaccttgtgacttatgacggtagatatgcatcttataaatgttaccacggaaaatagtaccagtatcgtcaacgattggcacacatctgtagcctgaatcttctaaaacttttaaagcttctgctaatgtggctttttcattaactgttgttaaataatcttttttaataactaaagatttaataagcatgagttcgcctccgaaagtgagaaatgtttcaagtaattatagcatagttgatgagttaattaaatattaattaaagttcatctgaagtaacaactatattttaacaatagttagacaaataaaaaagcatctccgaaaaaagagatgcttttaagtgaaacaagttttagattattgacgaaccttaacgccagtttccttaaatgccttgtccataaccttcttcaattgatctgcagaagcagtcatcaattcttgttccttgtcacttaatggcatttcaatgatttgttcaagacccttacggccaacaactgcaggagtaccaatgtgaatgtcatgtaagccatattgaccgtccataggaactgaaagtggaagtacacggtgttcatcgttcaagatagccttagcgatcattgctgaagcagtaccgattccgtagaaagtagcacccttcttgttaattatttcgtaagccatgttagcaacttccttgtggatgtcttcaagcttagattcatccataccgtgagccttaacccagtcactaacctttacgccaccaacattgttgtagctccatgctgggaattcagtatcaccgtgttcaccaagcatgtaagcattaactgaacgtgggtcaacatgttccatttcaccgataaccttttgaagacgaccagtatcaagtgaagtacctgaaccgataacacgatccttagggaaacctgacattttccaagttgcgtgggttaaaatatcaactgggttagcaacaactaagaaaataccttcaaagcctgattcaacaactggttcaacgattgatgataaaatcttcaagttcttgttaacaaggtcaagacgagtttcgcctggcttttgtggagcaccagcagtgataactactaagtctgcatccttacagtcagggtagtcagctgcatagatattctttggtgaagtccaaggggtagcatcagctaagtcaattgcgtcaccttcaacgtgttccttagcgatatcaataatacccaattcttcggcgataccttgttgtaccattgagaatgcgaaggttgaacctacagcaccatcaccaacaagaataactttacgaggtctttcatctcttggcataaataaaaatctccttttttattagtgatatttttaacaaaatgaattataccatgatagcaagcattaataaaattattatttcctaattgtgctattatatgtaagattgtgtgcatagtgaggagtaaaaataatgaagataattgcaggtttaggtaatccaggacaaaaatatgataaaacaaagcataatactggtttcatgacaatggatcattatttgaatgaaaagggtttgtcactggataaagataaatttgaaggtcattggactaagcaaaaaataaatggtgaagatgtaattttgcttgagccgcaaacctttatgaatgaatcaggtcgttcagttagtcaagtggctaacttctttaaggttgatccagcagatgtgctaattattcaagatgatatggatatgccaattggtaaaattagaattagagctaatggcaaatctggtggacataatggaattaaaagcatcattcgagatttagggacggaaaagtttaatcgtttgaagattggtattcgtcatccgaaaaatgcaacggttgtttcatgggttttgacaccatttaatgatgaacaacaaaaattgatggatgatgcatttgcgataagtgtagatattattgacgactttatcagcggacatggtagtcaatatttaatgaataaatataattaaaatgcgtttaacagagattttagataaagatcaagatttaaataattttatttcaaaaacaaaacaagtaaaaaattcactaatcactggcgctaatgccggtgcttttagtctattgctaaaacagataacaactaaattagcagctccacttattttaattgaagaaaacgaaagtaaagcacaaaacttatatggtgaactcagtgccattatggcagatgaaactgtgcaaatttttccagtagatgctacaattgcaacgcaaacggcagttagttcgcctgatgaactgagcagccgaattcaggcacttaattttttgttaagtggtaaggcaggaatagtggtaacaacgccgcaggggctgcaatacaaactgaccaatccaactgattttgcgcaggcaaagcggagttttgagccaggtcaagaatatgaactaaaagaactcaatgaatggttgcttgcttcagggtatcagcgtgattctttggtagcacgaccaggcgaattcgccatccgtggtgatattttagatgtttatccactagatcgagaaaatcccgtgcgaatcgaattctttggtgacgaaatagatacaattaaggaattcgatttagctagtcaacggagtcaaaaagagttagacaaagtagaagttgcagcagctcaagatcgagtttttactaaggatgcaattgcggcagcggctaagaaaattgaacaagatatggccagtgcaccagctcccgctaaagctgtcaaggaccactttgcggcagttcttgatgaattaaacgatggcggtttacctaaaaactatgctttcttaattgactatttgcttgaaatttctagtagtttactcgaatatttgcctaaaaatgggcagattttatttgacgatttgcctttaattaatcaagcggttgaaacagttgataagcaaaacgctgcttttattaatgatgaactaaaaactggtgcaatgttgccagggcaaagcttgcggtcagattatacaaagattctgagcaaagataagcaccatcgtatttatttctcattgtttcaacgaagcatgggacgactgcgcttaggccagatgctcaattggtcaacacgtgagccagaacaattctttagtcaaatgccgctgattaagtcagaattagaatcttatcaaaaggcggggcaaaccgtcattttacaggctgataatgaaaaaagagcacagcaaattgatcaaacaatggttgattttggcttaaatttaccaattgttggtgcagacgaaattgttgaacaacggacacaaattgtagttgatggctttgttagtggctttagtttaccaacagttaaattggtatatctaacggagcgtgaactatttaataagcgcccacaacgtaaaaaaagaattaagacactggagaatgcccagcgtttgcgcaattatactgaactgaagccaggggattatgttgttcatgttaaccacgggattggtcggtttgaaggaatcaagactttagaaaataatggtaccaagcgtgactatattacgattacctaccagcatggtgatcagctttttgtaccagcagatcaattaagcttagtacaaaaatacgttggttcagaaggtaagacaccacatattaataagctaggtggtagtgagtgggctaaaaccaagcgtaaggttcaatctaaagttgaagatattgcggatgatttgattgaactttatgccaaacgtgaatcagaaaaaggctttgctttttcacctgatgatgatctacaaaaacaatttgaagatgcctttccttatccagaaacacctgatcaattgcgatcggttaaagaaattaagcaagatatggaaagctcgaagccaatggaccgtcttttagtaggggatgttggttttggaaaaactgaggtagccttacgagcagcttttaaggcaattcaggataataaacaagtagcctttttagtacccaccactattttggcgcaacaacactatgagacgattcaagatcgcttcaaagatttcccagtcaatactactatgctatctcgttttcaaacgccagttgaatcaaaggaaattattgaagggctaaaaaatggcaagatagatttggttgttgggactcaccgtattttgtctcaagatgtaaaattcaagaatctaggattgttaattgttgacgaggagcagcggtttggcgttaagcacaaggaaaagttaaagcagttgaaggcaaatattgatgttttgacattaacagctacgccaataccgcgaacgcttcatatgtcaatggtaggtgtgcgtgatctctcagtaatggaaacgccacctcaaaacagataccctattcaaacttatgtgatggaacaaattcctagtgtagtaagggatgcatgcttgcgtgaaatgcaacgtgatggacaggtcttttatttacataatcggattagtgatatcgatgaaactgtcgaaaaactgcaggaattgatgccacaggcgcgaattgcagctgcccatggtcgaatgagtcagaatcagttggaagatattctttatcgcttcctgaatcgcgagtttgatatcttggttacgactacgattattgaaacaggaattgatatgcccaatgtcaatacaatgatcattgaagatgctgaccactatggtctaagtcagttgtatcaattgcggggtagaattggccgtagtgctcgtttggcttatgcttacttcttgtataagccaaataaagttttaactgaggttggtgaaaaacggcttgatgcgatccgtgacttcactgaactgggttctggtttcaaaatagcaatgcgtgacttatcaattcgtggtgctggaaatatgctgggtgcacaacagcatggctttattgatagcgttggttatgatttgtactcacaaatgctggctgatgcaattcaagaccgtaaggggaagacaacaatcaaaaagtcaaacgcagaaatcgaccttggacttgaggcttatattccagattcgtatatcggtgatcaagaagaaaaaattgaattttacaaaaagattaaagccgtctcaagtcaggaagaattaggtaaaattgaagatgaattaatcgatcgttttggtgactatccaacggccgtcgagaatttattagctgttgccggtctaaaggttgatgctgacatggctcaagtgctcaatgtggttaaaactgacgataagattaaagtggaatttacgaatgcagcttcacgcaaacttgagggacctaatatttttaaggcattggagcatgtaagtttaaaggctcgcattagtatgaatcaagaaaaaagaatggttgtcttgctattgttgccggataaaatgaagaatcgtgttttattcaatgaactagcaacctttttacaggcagcaagcgacattgtacaaaggtaactgtaggagaaaaatatgaggattgataaatttttaaaagtttcacgattagttaagagaagaaccgtagctaaagaaatggctgatcaaggtagaatcaaagtcaatggtcgagttgtaaaatcaagctacgatgtaaaaattgatgatattattgaagtaggttacggcgccaaaaccatcaaggctaaggtgttaaatattcgcgagaccacgaaaaaagcagaagcaagtgaactgtacgagctagttgattaatgacttttgattaaatcgttgttatacttgacttagtatagttatttagtaattaggggattaaacaatgaatcatggtccacgtatatataattcgttgagtccagaagagcagagggcgcgtcttagacgtaaacaggctaaattagagaaagaaacacaccgcaagcggttgaacgtaattatggcagtttttgctatcattttcgttgctttaggtgtacagattgcaatcaagatttctcaaactggacgactgaataatcaagtacaagctgaaaaacagactttaactaaagtaaaaaataagagaaatgacttagaaactgaaaagcaggatttgaaggatccaaattatgttgctaagctgattcgttataaattctattattctaaatcaaatgagaagatttataacgtgcatgaaagaaatgatgataactaatggaaaagtatcaagctggtaatcgggtgactggtgtaattaataacattactgacttgggcatctttgttactttacctaatcggcattctggtttggttcatcatagtgactttggcaataattggctacgcgaacgtcgtcgttatcatgctggcgatgaagtgcgcgtggttgtggtgcacatccataaagggagatttaatttatcgatcactcgagtgaatgatccggaattagttgaccatgataatcaattttctaagacaaagccagctgattttgatcaagtcctgaatcaaacaacgcgggatgctaaagaagaaattgaaaagctaaagcaagtattaactgagaattaagagatggtccgaaagggccattttttgttagaaaaataatgaaaattaatgatttttttgaacaacatcagattgacttaaaggataaaagactattagtagccgcaagtgcgggaccggattccatggctttactagatatgctagttaatttgcaaaaacaactaagttttactgtttttgcggcacattttgatcatcaattgcgtgcggatagctcatatgaagtagaagttttgcaaaattattgtgctcaaaagaagatttgcctgtttaatggcaagtgggataaacatgatcagccccaaacgggaattgaggcagcggcgcgagaggcacgatatcattttttgactaatgttgctcatagcgagcgaatgaactatttattaactgcgcatcatggtgatgatttgctagaaaatattttgctcaaatttattcgctcgggaaatcctgaagagatgaatagtttgcaagatatcggctctatgcatggcgttgttttgcttagaccactattagcctatagtaagcaagaattactcgaatatgatcaagagcgtgaaattgactatgtaatagattcaactaatacggaggatgagactgttcgaaatcgactgcgtcatcatgtggtgccattattaaaagaggagaatcctaatttaattagtaatgcactgcgttttagtgaaaaaatgagtcaattgacggatttggcggatgagcagttgaatagtatgagaacggttgagccatttttgggtgcttggcgaattaaaacggacaacttaaatgatttatctacagaagaaaaaaatattttttggcaaaagataatctggcaaaaatatcatcgccgggtaaatgaaaatttgggcaattttgaggtgattgattatcaaggttatagttatttagttgaaaataagccacagaaaattgtgcagccatttagtatcgaactaaatcagcaatttgaattcaacggagcttattatttactaactactgataggcaagctgatttgaaagaaataggaagcttttggctggaaagggatgcacattttactgcgggaagtctagtacctgctagcaaattattgttgaaaaatggtcaacgagttaaggcgaaaaagaaatttgcagaaaaggcaattccctttgccttgcgctcttgctgcattacaatttatgctgaaaatgaacctgtttttgtagaaaaatgttatcaaaaacaggactttatcacagatggtaaacattatttcctatacatttattaagaagtcttcaaaataggtgaaaatgttagtggttgcaagctaatttgtgatagaattttaaacgtataacttaaagactttgcggaggttttttatgaagaataaccggaatcggctactttcaaacggccttttctatatagttgtgttccttctgctcctatggggaatcaactgggcactcggcggctctaacaatagtggtagctcagagaatatcagttactcacaatttgttaaagatttgcgtcaaggcaaagttaaaaactttagtgttcaacctgctaatggtgtttacactgtttcaggtagttacaagactgcacaaacaacaaagaatcaatcaaataatagttttgatttctttagtaataattcaagtagaaaagtttcgcgcttctctactaccatgttacagaatgattctaccgtttctaacgtgcaaaacttggcacaaaaaagtaatgctcggatgacaactcaaggagaatcacaatctggcaattggatttcgaccattgtcatgcttgtgccaaccgttttgtttatcgtcatgctttggatgatgatgaaccaaggtggcgctggacgtggtggtggcggcggaataatgaatttcggtcgttcacacgtcaagccagaagatccttctaagaataaggttcgtttctctgacgtagccggtgaagaagaagaaaaacaagaattagtcgaagtagttgaatttttgaaagatccatctaagtacactaagttgggtgcaagaatcccatctggtgttttacttgagggtcctcccggtactggtaagactttgcttgctcgtgctgtagctggtgaagctaacgtgccattttattcaatctcaggttcagacttcgttgaaatgtttgtcggtgttggtgctagtcgtgtacgtgacctgtttaacaatgccaagaaaaatgcaccaagtattatctttatcgatgaaattgatgccattggtcgtcgtcgtggcaatggcaccggcggtggtaatgatgaacgtgaacagactttgaaccaattattggttgaaatggatggttttgaaggcgatgaaggtgttattgtcattgctgctactaaccgttcagacgtcttagacccagctttgcttcgtcctggtcgttttgaccgtaaggtattggtaggtcgtcctgacgttcgtggtcgtgaagctattttaaaggttcacgctaagaacaagccgcttgcacctgatgttgatttgaaggaagttgcccgtcaaactcctggctttgtaggtgcagatttggctaacgtcttgaatgaagccgcattagttgctgctcgtcgtaatggtactgagattactgcatcagatattgatgaagccgaagaccgtgtgattgccggtccagctaagaaggatcgtttgatttctgaaaaagaaagaagacgtgttgctttccacgaagctggtcactcaatctgtggtttggtcttaagcgactcacgtactgtacgtaaagttactatcgtacctcgtggccgtgctggtggttataacatcatgttgcctaaagatgatcaattcattttgactaaaaagcaattatttgaacaaattgttggtttgatgggtggtcgtgcaggtgaagaagcaaccattggtgataagtcaactggtgcttctaacgactttgaacaagctactcaaattgcgcatagcatggtagttaactatggtatgaccgaatccttaggtatggttgagcttgaaaaggaaggcgaaagcaatccttacggctttaagccatatagtgaagcaacttcagctaaaattgatgaagctgtaaagaagattttggatgaagctcatgctaaggcccttgagatcgttaaggacaacaaagaaaagcatagaatcattgccgaagctttgctcaagtatgaaaccttgaatgaaaagcaaattatggccttgtataagactggtaagatgcctgaaaaagacgaagatgaatatccgagtgaatcaaaggcttcaacttatgaagaagctaaggctgctgcagagaagcgcgaagttgaaaaggcagaaaaaaaggattcagatcaagcattagctgatcaagaaaaagataccttggagactccatctgaaaagaatcatgaagttgaagaaaataatcctgagaatcccgaaaaggatcaatcagaaaatgaaacttcaactcaagatactcctgcagatgatgagcataaagacaattaaataaaagtagggcctgtcacaggctctatttttttagaaaagaaggataaaaatgagtgattatttagtaaagtcaattgataagactaaaaacttacgcttgttaaccattaccgctaagggtgtagtgagtgaagcacaaaagcggcatgacttgtggtcagcttcagctgctgtgcttggtcgtactttagtaggatctcttttacttgctggtgcagaattgacagataaggaagaattgacagtccgtttattaggcaatggccctgttggtccaaccatcgtgacagctacctccgatttgaaggtaaagggttatgttaagaatccacatattgctttaccacctaagaaaaatggtcatattgatgtgaaaaaggctgttggacaaggatggtttgaagtaactaaggaccttggcttgaaggaaccatacacaggtcaggtaccaattgtttctggtgaaattgctgaagattttgcttactatttgactaagtcagaacaaattccgtcagctgttggtttgtcagtatttgttaatccaaataattcaatcggtgaagctggtggctttatgttgcaagcacttcctggtgctagtgatgctttgatcgatgaaacgattaagcgaattgatgcattgccagcactctcaacttcatttttggatggaatgacaccagaagacttagcacgtaaaatcttaggaaccgattgtaagattcttgaaaaagatgatgtagcctttaactgtgattgttctaaagaaaagtatgctggtattttggaaactttgaagagcgatcaattgaaagcaatgattaatgaagatcatggtgccgaacttacttgcaatttctgcggtaacaagtatcattattcagaagatgaattgaaagatattttagctaaaaagaacaaagataaagattattaaggcaaataaagccctaaggttttaaccagcggggcttttttgatatcataatagggtaattttgaaaggatgatttggtgaataacagctggaaaattcgcgatatcaccattccaaaccgagttgttgttgcgccgatggcgggagtttcaaactctgcattccgcgttgtctgtaaggaattcggagcggggctggttgtctgcgaaatgatttctgatcatgggatcatttatggaaataaaaagacattaagtatgatggatgttgatccgcgtgaacacccaatgagcattcaaatctttggcggaagcgaggaaactttgcttcaagctgctcaatatattgatcaacataccgatgcggatattattgatattaatatgggttgtcctgtacctaaagtaacaaagactgatgcaggttcgaagtggctacttgattcaaacaagatttatcagatggttcacgcagtagtgcagaacgttaaaaagccggtttctgttaaaatgagaacaggctgggataaaaagcatatttttgctgtagaaaatgctttagctgctcaagaagcaggcgcaagcatgattgcgatgcatggtagaacacgtaaacaaatgtatcaaggtgaagctgactgggaagtattacatgatgttgcccaggtgctagatgtgccttttgtggctaatggtgatattagaacacccgaattagctaaaaaagcattggatgagatcggttgtactgcagtaatggttggtcgcgctgctttaggtaacccttggattttgaaagatatggtacactatctggaaactggtgaaaaattgaagccgcaaactgttcgtgagaaggttgaaacggctaaacatcagcttcacgcacttgttaaaattcacggtgaaaagcgtgctgtaccagaatttcgtcagcaagccgcgtattatttaaagggaattccccgttcagcccgtactcgtgctaaaataaatgaggtctggacgcgtcaagaagtatatgatttgcttgataattttgttgacgagtatgaaaaaagagaagaagctcgtgctgcacgacgcgcgacaatgaacaaataaatggaggaaaagtaaattggcaaagaatgaaatgaatgaccaattaatagttcgtcgccagaagatggaagaattacgtgaaaacggaattgaaccatttggtcaaagaaaatttgatcgtcaagatttggcaagtactttagaagaaaagtatggcaacgaagataaagaagaattaaacgctgatatgcctaagaccaagattgcaggtcgtatgcttgcaaagcgtggtaagggtaaggttggttttgctgatctttacgaccgtactggtaagattcaaatctatgtacgtaaggatattgttggcgaagataactacaagatctttaagaaatctgatattggtgatttcttaggtattgagggtgaagttatgaagactgatactggagagcttactattagagcccttcacgtaactttcttatcaaaggctcttcgtccattaccagataagtaccatggtttaaaggacgttgaggcaatttatcgtcaacgttaccttgatttgattaccaaccatgatagttacatgcgttttgttcaccgtacccaaatcattcaagctattcgtgactacttaaatggtcaaaacttcttggaggttgaaactccagtacttcacaacattcctggtggtgctgaagctcgtccatttattactcaccacaacgctttggatattaacctttacatgagaattgctttggaacttccacttaagcgtttgattgttggtgatatggaacgtgtttacgaaatcggccgtgtattcagaaacgaaggtttggacactcaccacaacccagaatttactgaacttgaaagttacgcagcatactgggactaccatgatgttatggatgaagctgaaggtattatccgtgctgcagctaaggttgtttcagatgacggtaagatcacttaccaaggtactgacattgacttaggcaagccattccgtcgcgttcacatggttgacttgatcaaggaaaagactggcgttgacttctggaagccaatgactcttgaagaagcaactaagattgcggaagaccacgacatccacgttgaaaagttctggaaagttggtcacattattaacgccttctttgaaaagtactgtgaagaaactattgttgacccaaccttcgtttacggtcacccagtagaaatctcaccacttgctaagaagaatgctgacgatccaagatttactgatcgtttcgaaatttacatcatgggtgaagaatacggtaacgccttctcagaattgaacgatcctgacgaccaacgtgaacgtttcgaagctcaaatggaagaacgtgaagcaggtaacgacgaagctgacatgatcgatgaagattaccttcgtgctatggaatacggtatgccacctacaggtggtttgggtatcggtattgaccgtttggtaatgcttttgactgatgctccagctattcgtgatgttcttttgttcccaacaatgcgtccagaacgtgttgaaagcgtagaagctgaagttaaggctgatatggaaaagaagaataaagaaaataagtaatcttataaattaaaaaactcttatctatgttttaagcatggataagagtttgtgtttatatattttttaattgagaatcattttttcatcagagtattttttaggatcatttaaatcccattgctgatatctaacttcttgacacttaaagcctaattttttgtaaagctttttggccttagtattttctgcaaatacatcaagactaactggtcgactcatgtatctcaaagctgtcgttgctaaagcatacccgatacctttattttgatgaattggatctacataaatgtaatccagttcttggggatgaactgcaacgaagcccaatatgctgtcagcatcataagctacataaattttgcaggagaaaaaatcatccttatatggagctgtctctaaaggtatgaagtatttttccgcaccaccaattgttagctcttctttacgactaacgtcgtgaatgcgacatacttcagcataatcgtttggttgatattctctgatattaaattttggcatgtttttctcgcttcctaatattaagattttgatttagaaagcaatagtacgtaatctcatgtgaaatctcctttaattaaattgaagatattatagcaatttttttaattcggtacaataactaaaattaacttagttaaaaacagataagtaatattttttcaaaaagtatttgcaaagagaataatctttgctataataatttttgtatcgcggaagtagttcagtggtagaacatcaccttgccatggtgggggtcgcgggttcgaatcccgtcttccgctccaagatgaagagctcacgaatgtgagctttttttgtgcctaaaataaatttatcttttttgataaaaaggtcttgcaaagaaaaatgtatttgctataataatatctgttgttgcggaagtagttcagtggtagaacatcaccttgccatggtgggggtcgcgggttcgaatcccgtcttccgctccaagatagaaggctcaccaagtggtgagtctttttttacgggaaatagctcagtttggtagagcgctacgttcgggacgtagaggtcgccggttcaagtccgattttcccgatatacaagctatccgtttgggtagcttttttctttttgttataatatcttttaaaacttaaagggagattaaaaatgacggcaactactgaagaaaaatacaaattattagtggagcaagctagagctttgattgagggagaagatgattggattgctaatacagctaatttatctgctcttttgtttaattcgttaaatgatgtgaattttgcaggtgtttatcgctatgaaaatgatgaactgatattaggtccatttcaggggatgccagcatgtgttcatattcaaatgggaaaaggtgtttgtggtacggctgcacaagcaaaaacaacgcagattgttaaggatgtacatgaatttgctggtcacattgcttgtgatagtgcttcaaattcggaaatcgttgtcccaatttttaatcagggaaaactttggggcgtctttgattttgattcgaccaagctagctaattttgacgaaattgataaaaagtatttaactgaaatagcgaaagcaatttttgcgtaattattagaattggacataatgaagttgaagataagtcaaattgttttacttactgacaaaagaaaagtaaaataccataacgtattttaaagggtggtgtttgtatggaaaattcatatagtaagagcgttaatcaagtattgaaaattgcacgtgaacaagcacaaaattttcatcatcgcttgattggcacagaacatgttttattggctctagtaattgaaactgacggtgaagcaggaaaaatcttgcgttcatggggattaacaccaactgcagtacgtgaagaaattgaacgttatacaggttatggctctgcccctaaggcaagctacatggaaatgtcaccacgtttgagtttagctttggattatgctagaagacgagctaatgacgatggagttaaggaagttaacactaatcatgttttgctgggaattactgcaagtgagcaggttttatcagcaatgattttgaaaaacttgaatgttgatattcctcgtctgcagcaggatgttgaagacagtttgagtcaagaccaagactttggtgattcagctaattggctgggtgatgataacacgacgactggtcaaaagaagcgcaagagcactactcctaacttagataaggtagcggttaatttaaatcaacgtgtgcgtaatggcgagattgatccggtgattggccgtgaccaagaaattaagcgtgtgattcaaattttgtctcgacggactaagaataatcctgtcttagttggtgaaccaggagttggtaagactgctgttgctgaagcgattgcaactgagattgtcaacaaaaaagtgccacaggatatgcttaagaaacgggtaatggccttaaatttaggtagtttagttgctgggactaagtatcgtggtgagtttgaagacagaatgaagaaaatcctgaacgaagtcaccaaggatggcaatgtcattctctttgttgatgaaatgcatactttaattggtgctggtggtgctgaaggtgcaattgatgcttctaatatcttgaagccttcgcttgctcgtggcgatattcaaatgattggtgcaactacttttaatgaatatcaaaagtacattgaaaaagatcaagctttggcacgtcgttttcaacaagtgcgcttaagtgagccttcaagagatgacactttgacaattatgcgtggcttgaagtcgaaatatgaaaagttccatcatgtgactatttctgatgagagcttgaaggatgcagttgatttgtcaacgcgctatatttcggatcgctttttgccagataaggcgattgacttagtagatgaagctagtgccgcagttaagattcgtaataacattagcaatgatgctgagctagaaaaagttaatgagcaaattaagaaactgattacgcaaaagaatatggctgccgctagtcaaaactttgttaaagctgctcaattgcaggatgagcagaacaacttagaaatgcaacgtgaagcaatggtagagaagttagaagacaaagttagtgctaaagctgtggttgagccagaagatatcgctaaagtagtttccaactggactggcgtccctgttacccagatggaacgcaatgaatcacggcagctagctaacctggaaaagattttacaccaacgtgttattgggcaagataaggctgtttcagcagttgcccgtgctattcgtcgtagtagaagcgggattaaagatgaacgtcgtccgattggttccttcttgttcctaggtccaactggtgttggtaagacagaactagctaagtcagttgcagcagcaatgtttggctcggaagacaatttgattaggctagatatgtctgaatatatggaccaaattgcttcaagcaaattaattggctcggcaccaggctatgtcggttatgaagaaggcggtcaattatctgaaaaggttcgtcgtcatccgtactcggttattttgcttgacgaagtagaaaaagctcatccagatgtctttaacttgcttttgcaggttttagatgaaggatttttgactgactccaaaggtagaaaagtcgactttagaaatacaattataatcatgacttctaatttaggttctcgttcgctctttgataataaggcagtcggcttcaatgcagataatgcagatccagccaaggcgagatcagctaaagttgaacaagcaatcaaacaattcttccgcccagaatttttaaacagaatcgatgaaactattatcttcgatgaactagataagaagcagctgcgcaatattgtaactttgttaacgcacaagctggtagttcgtttgcaaaagaagggtatcgaattgaagctatcacgggcagcactggatcagattgcacaagatggttatgatccagaaaatggtgctcgaccattgagaagagcaattcaaaatgatattgaagacaagattgccgagatgctgattgtaggcgaagttaagtcaggcgacactttgaaaattggtagtcagcatggacatttaaaatttgaagtagttaatccgaaaaaagaaactgtaaaagtcaagtgatattggtgctataccttgacaaaatgctgaaaatatcatataatttttgctgatttaaaaagactgagattcaggattttgctgatctattgtccagcaaaatgataagggacaaaaacgacaattgttgtttttgtcttttttatgcctaaaattgcagttttttgaatttgtaacagaaatgtaatatttgctttcttagacagaaaggatgtttttccttgttaaatggacacgtagtgaactacggtaaacatcgaactagacgtagcttctcccgcattaaggaagtattgaagttacctaacttaactgatgttcaaaccgaatcatataagtggtttcttgataaaggcattaaagaagtctttgatgacattatgccgattagcgatttctcaggtaagctttcattagaatatgttggctataaattgcaaaagccaaagtatacagttgatgaagcccgtaaccatgatgcaacttatgctgcaccaatgcacgttaccttgaaattgactaaccaagaaactggtgaaattaagactcaagatgttttctttggtgatttgccattaatgaccgaatcaggttcatttattgttaacggtgctgaaagagttatcgtttcacaattggtaagatcacctggtgtatattacactggcgattatgacaagaatggtcgtcaaatctttggtactactgttattcctaaccgtggtgcttggcttgaatatgaaaccgacgcaaagaacgtttcatttgttcgtgtagaccgtactcgtaaattgcctcttactgtattgattagagcaatgggtattggctctgacagtgacattattgatatgtttggtcaaagtgatactttgcaattcactttggacaaggatgttcataagaacccagctgactcacgtgtagctgaagccttaaaggatatctatgaaagacttcgtccaggtgaaccaaagactactgattcttcacgttcacttttgtatgcccgtttctttgatccacgtcgttacgatttagcacctgtaggtcgttacaagatcaataagaagctttcacttaagaaccgtttatacggtcaaactttagctgaaactttagctgatccagatactggggaaattgttgctaagaagggtactgtagttacccacgaagtaatggataagttagctccataccttgatcgtgatgactttaagatggtaacttaccaaccttcaaaggaaggcgtattaccagatcctattacagttcaagaaattaaggtttactcaaaggtagaccctgaacgtgaagttaaattaatgtcaaatggtcatattgctgataacgttaagcatttgactccagctgatgttttagcttcaatcaattacttctttgcattgcaagatgaaattggtactactgatgatatcgaccacttgggtaaccgtcgtattcgtcgtgttggtgaacttcttcaaaaccaatttagaattggtttggcacgtatggaacgtgttgttcgtgaaagaatgtcaatccaagatccttcaacagttactccacaacaattgatcaacattcgcccaattgttgcaagtattaaggaattctttggttcatcacaactttcacagtttatggatcaacataacccattaggtgaattgactcataaacgtcgtatgtcagccttagggcctggtggtttgacccgtgaccgtgctggttatgaagttcgtgacgttcactatactcactatggtcgtttgtgtcctatcgaaactccagaaggtcctaacattgggttgatcaactcacttgcttcatatgcgattattaataagtatggttttatcgaaaccccataccgtcgtgtttcttggaaggaccacaaggttactgataagatcgactatttgactgctgacgaagaagataattacattatcgctggtgccaacactccattgaatgatgatggttcatttaaggagaagttgatcttggctcgtcaaaaggaagataacgtcgaagtttctccagataagattgactacatggacgttattcctaagcaagttgtttctgtcgcttcagcatgtattccattccttgaaaacgatgactctaaccgtgctttgatgggtgccaaccagcaacgtcaggctgcaccattaattaatccgcatggttcacttgttggtactggtatggaataccgtgctgcacacgattcaggtgctgctttaatcgctaaggctgctggtgtagttgaatacgttgatgctaatgaaatccgtattagacgtgaagatggtactttggacaaatacacacttgaaaagtaccgtcgttcaaataactctaagtcatacaaccaaactcctaatgttaaattaggtgatcaggttgacaagagtgatgtaattgctaacggtccaactatggatcatggcgaacttgctttaggtcaaaacccattgattgccttcatgacttggaacatgtacaactatgaagatgccatcatgctttctgaacgattagttaaggatgatgtttatacttcaatcagtattgaagattatgaatcagaagctcgtgacactaagttaggtccagaagaaattactagagaacttcctaatattggtgaggatgctttgaaggatcttgatgctgatggtatcgttcgtgttggtgcagaagtccacgatggcgacattttggtaggtaaggtaactcctaagggtgtaactgaattatctgctgaagaaagattacttcacgctattttcggtgaaaaagctcgtgaagttcgtgatacttcacttcgtgtaccacacggtggtggcggtattgttcaagacgttaaggtttatactcgtgaagccggcgatgaactttcaccaggtgttaacacaatggttcgtgtttacatcgctcaaaagagaaagattcaagttggggacaagatgtctggtcgtcacggtaacaagggtactgttgctgcagttgttccagaagaagacatgccatacttaccagatggtactccagtagatatttgtttaaacccaatgggtgttccatcacgtatgaacatcggacagcttcttgaattgcacttaggtgcagctgctcgtcaattgggcattcacgttgcaacaccagtatttgatggtgctgacgaaaatgacgtttgggacacagttcgtcaagcaggtgttgataaagatggtaagaccgttgtttatgatggtcgtaccggtgaaccattccacaaccgtgtatctgtaggtgttatgcactacttgaagttgacccacatggttgacgacaagatccacgcacgttcaattgggccttactcattggttactcaacaaccacttggtggtaaagcacaatttggtggtcagcgttttggtgaaatggaagtttgggcccttgaagcttatggtgctgcttacacattgcaagagattttgacttacaagtcagatgacgttgttggtcgtgtaaaggcatatgaagctattgttaagggtgaaaagattcctaagccaggtgttccagaatcattccgtgttcttgttaaggaacttcaatcattaggtttggatatccgtgttcttgatatgaaccataatgaaattgaacttcgtgatatggatgaagactcaagtgaacacttgaacatcgatactttgtcacggatggcagaagagcaagaaaagaagaagttagccgaagaaactggaaaatcagaagataaagacagtaaagaaaatgcagataagccggtagctcctgcagatgagtctgacgataaagtttctaaatagtaggaggttaaacttttgatcgacgtaaataagtttgaaagtatgcaaattggtcttgcatcacctaacaagatcagaagctggtcatatggtgaagttaaaaagccagagaccatcaactaccgtactttaaagcctgaaaaagatggcttatttgatgagagaatttttggaccaacaaaagattggtcatgtgcttgtggtaagtacaagggcgttagataccgtggtatcgtttgtgaccgttgtggtgttgaagttacttcttcaaaggtaagaagagaacgtatgggtcatattgaattggctgcacctgtaactcacatttggtactttaagggtatcccatcaagaatgggattatttttggacatttctccaagattacttgaagaagttatttactttgctgcatacattgtaattgatccaggtgatactgaccttgaacctaagcaattattaactgaagctgaataccgtgaacaaaaagctaagtacggtaaccgttttgaagctaagatgggtgctgaagctgttcgcgatttgcttaagaaagttgaccttgataaagaagttaaggatttgaagaaagaacttcaaactgccactggtcaaaaacgtacgcgtgcaattagacggttagatatcttggatgccttcaagaattcaggtaacaagcctgaatggatggtaatggatgccgttccagtaattccaccagatcttcgtccaatggttcaacttgaaggtggccgttttgcaacttcagatttgaacgatttgtacagacgtgtaatcaaccgtaacaaccgtttgaagagattgcttgatttgaacgcacctaatattattgttcaaaacgaaaagcgtatgcttcaagaagctgttgatgctttaattgataacggtcgtcgtggtcgtccagttgttggaccaggtaaccgtccattgaagtcactttcacatatgcttaagggtaagcaaggacgtttccgtcaaaacttgcttggtaagcgtgttgactactctggtcgttcagttatcgatgtttcaccaaaattgaaattctatcaatgtggtgtgccacgtccaatggctttggaattgttcaagccatttgtaatgcatgaattagttaaacgtggaattgcatcaaacatcaagaatgctaagcgtaagattgaccgtgaagatgacgatatctgggatgtacttgaagatgtgattaaggaacgtccagttcttttaaaccgtgcacctactcttcaccgtttgagtattcaagcctttgagccaatcttggtaccaggtaagtcaattagacttcacccattagcttgtgaagcctacaatgccgacttcgatggtgaccagatggctattcacgtaccactttctgatgaagctgttgctgaatcaagattgttaatgttggctgctcaccacattttggctcctaaggatggtaagccaattgttactccatcacaggatatcgttttgggtaactactggttaactcaggccgaacgtggtcgtgaaggtgaaggtatgatcttcagctcaccagcagaagctgctgtagcttacgaaaatggcgatattcactaccataccattattggtatgtctgcagatgctatgcctaaaaagccatggcctaagggacatgaacacggcatctttattaccacttatggtaagattgtcttcaatcaattgttcccagatgattacttctatatcaatgaaccaactgaagagaacttgaacaatccgttggatgctaagtacttcttaggtgaaggcgaagagattgataagaagatcgatgaagtaggcgatgatttaatcgctagtccatttaagggaagcttcttgtcagattctattgctactatttacaagtattacaaggttcaaagaacttcagaatacttggatgatttgaagaagttaggctacattagctcaactacttcaggtattactattggtatgactgacgttccagaaatccaagataaggatgaaaaggtagccaaggcacgtaaacaagttgatgttgtttctaagcaatttagacgtggtttgattactgaacaagaacgtcacgaccgagtaattagtatttggaatgcatgtaaggacaagatccaaaacgaaattgcacaaattcacgcacctcgtaatccaatttcaatcatggcagactcaggtgcccgtggtaacatttctaactttactcagttagccggtatgcgtggtttgatggccactcctaacggtggtttgttcgaaattcctgttacttcaaactttaaggaaggtttgtcagtattggaattgttcatgtctactcacggtgctcgtaagggtatgactgatactgcattgaagactgctcagtcaggttacttgactcgtcgtttggttgatgttgctcaggacgttattattcgtgatgacgattgtggtactgatcgtggtattacagttagtgccatcatggaaggtgacgaaatgatcgaaccattatttgaccgtttggttggtcgtttcactgctgagactgttaaagatcctgaaactggcgaaactattgtcggcagagatgtcatgatggatgaaaacatggcacacaagatttgtgatgcaggtgtaactcacgttaagattcgttcaattcttacctgtgatactcctcacggcgtatgtcgcaagtgttacggtatgaaccttgctactggtgaagaagttgaagttggtgaagcagttggtactgttgctgctcaatcaattggtgaaccaggtactcagcttactttgagaactttccacaacggtggtgttgccggtgctgaagatatcactcaaggtttgcctcgtgtgcaagaattgtttgaagcacgtaaccctaagggtcgtgcaaccatttctgaagttgatggtgtaattgattcaattcaagaaaacccagcagaacatactcgtgaaattactgttaagggtaagattgatactagaagctacagtgttccttatacagcttcagttgctgttagcgaaggtgactacgttcatcgtggtgacaagttaactcttggttctgttgatcctaaggaattgattcgagttactgatacattaactactgaaaagtacatcttagctgaagttcaaaaggcttatagaatgcagggtgtagacattgccgacaagcacgttgaagtgttaactcgtcaaatgctgcaaaaggttcgtgtccttgatccaggtgaaactgacatcttgccaggtgaagttatggatattggtcaatttagagaccgcaacaaggaagttagtatttctggtggtattccagcaactgctcaaagcgttatcttgggtattactaaggctgctttggaaactaacagtttcttgtcagctgcttcattccaggaaaccacacgtgttcttactgatgcatctattagaggtaagaatgatccacttcttggacttaaggaaaacgttattattggtaaaattattccagctggtactggtatgcctgtataccgcagcatggaacctgaagctgacgttaagaagccagattcagtatactcaattgctgatattgaaaagcaaatgaaagaaaaggataaagctaagcaagactaagctttattgaaaataaataagcatttccaatcttttaagagcgggaatgcttatttttttgtctaaaaaattaattgggttagtactaatcctaggaaaatatatggaataaatggatagcgatggttaataggagttttttcaataagaaaaattgcaattaccaagattgaagcaaatagaaaaactaaattggcaaatgatggggtgaagtagcaagcgataattaagtaaattaataaatcgcctagccccatttttctttgcattatgctatagctaaaaattcctagcaataatgtaaaagagatccagtcgattaatgtaaaagctgcaaattggttgaataaaatcgcaacgctaatggctggaattagtaggagaagatcaaattcttgcttttgataatcagagattgcaacgactaaaagcgaaaaaagcaaaatagcggtaataatgtcctgtgtcttactaaaatcgagtaaacaaaaggcaaagccgccaattaattcaaataaaaataattcaactggaatttgttgataacaataacgacattttccttgaagaaaaagataagataataatggaatttcatccaaaattgataattcaaggtgacagttgttgcactgagaacgtgagtaaataaaatttttatcattccagtgctcgtaaactactgctgcgtgagaagccaagcaacttccaattataaagttagtaaaaataaataagtatttcaaaaaaacacctccactatttattacgcaaaaatagccgatttttctttttttattttgaaaaagtttgctttctgcttaaaaccgagtacaatagtctttgtatgttttgaacagtctattcgtgagtaaaaaagaaactcccggatgtgtgaacaaaatagtattttaggaggaaaaattaatgccaaccattaatcaattggtaagaaaaggccgtcattcaaaggtcactaagtcaaagtcacctgctttgaattacagctacaacagtatgaagaaggaatcagtattcaacccagctccacaaatgcgtggtgttgcaactcgtgttggtactatgactccaaagaagcctaactcagctttacgtaagtacgctcgtgttcgtctttcaaacttgatcgaagttactgcttacattccaggtgaaggccacaacttgcaagaacactcagttgtattaatccgtggtggtcgtgtaaaggaccttcctggtgtacgttatcacatcgttcgtggtgcccttgatactgctggtgttgatggcagaaagcaaagccgttctaagtacggtactaagaaagattaaaggaggagttaaataatgcctagaaaaggtcacgtaactaagagagacgttttagcagatccagtttacaactcaaagcttgttactaagttgatcaaccacttaatggtcgatggtaagagagctaaggcatcttcaatcctttacgatgctttcaacattgttcaagacaagactggtaaggaaccacttgatgtatttgaagaagctatgaacaacgttatgccagttttggaagttagagctcgtcgtatcggtggttcaaactaccaaatcccagttgaagtacgtcctgaaagaagaactactttaggtttaagatggcttgtttcatacgctcgtttacgtaacgaacacactatggatgaacgtttagctaacgaaattatcgatgcttcaaacaacactggttcagcagttaagaagcgtgaagatgttcaccgtatggctgaagctaaccgtgcatttgcacactaccgcttctaatttgttcgttttaatttaaggagagaataatttatggctaacaagcgtgaatttccattagcaaagacacgtaacatcggtattatggcccacatcgatgcgggtaagactactactactgaacgtatcctttactacactggtaagatccacaaaattggtgaaactcacgaaggtgattcacaaatggactggatggatgaagaaaaggaacgtggtatcaccattacttctgcagctactactgcacaatggaaagaccacagaattaacatcatcgacaccccaggacacgttgacttcactatcgaagtagaacgttcacttcgtgttcttgatggtgccgtaactgttcttgatgcccaagctggtgttgaaccacaaactgaaaacgtatggcgtcaagctgaaacttacggtgttcctcgtattgttttcgttaacaagatggataagatcggtgctgacttcgataagtcagttaagtcattgcacgaacgtttaaacgctaatgcccatgctgttcaaatgccaattggttcagctgacacttttgaaggtgttatcgacttaatcaacatggttgccgacatctacgacgaagataagcttggttctaagtgggatactgttccagttcctgacgaatacaaggaagaagctgaagcacgtcgtaacgacttaattgaagccgtagccgatgttgatgacggcatcatggaaaaattccttggcggtgaagaaatttctaacgatgaattaaaggcagctatccgtaaagctactttggacttgaagttcttcccagtttacgctggctcagccttcaagaacaagggtgttcaaatgatgcttgacggtgttattgactacttgccatcaccacttgacgttaagccttacgttgctcacaatcctaagactggtgatgaagttgaacttatggctgacgataagaagccatttgcagctcttgcatttaagattgctactgacccattcgtaggtcgtttgactttcatccgtgtttacaccggttctcttgaatcaggttcatacgtattgaacgcttcaaagaattcacgtgaacgtgtaggtcgtttgcttcaaatgcacgctaactcacgtactgaaattccagaagtattctcaggtgacatcgctggtgctatcggtttgaagaacaccactactggtgactcattaactgacccagatcacccacttattttggaaagcttgaaagttccagatccagttatccaagtatcagttgaacctaagtcaaaggctgaccgtgataagatggacgttgctttgcaaaagcttactgaagaagacccaactttccgtgctgaaactaacccagaaactggtcaaaccttgatttcaggtatgggtgaacttcaccttgacatcatggttgaacgtatgagacgtgaatttaacgttgatgctaagattggtgaaccacaagttgcttaccgtgaaaccttcaccaaggaagctaaggcacaaggtaagtttgttcgtcaatcaggtggtaaaggtcaatacggtgacgtttggattgactttactcctaacgaagaaggtaagggttacgaattcgaagatgccatcgttggtggtgttgttcctcgtgaattcattccttcagttgaccaaggtttacaagaagctatgaagaatggtgttcttgcaggttacccattgatcgacgttaaggctaagctttacgatggtagttatcacgaagtcgactcatcagaagctgccttcaaggttgctgcttcacttgctttgaagaatgctgcttcaaaggctggcgcagttatcttggaaccaattatgaaggttcaagtaactactccagaagaatacttaggtgatgttatgggttcaatcactgctcgtcgtggtaccatggaaggtatggaagacagagccggtgctaagatcatcaactcatttgttccactttcagaaatgtttggttacgcaactactttgcgttcatcaactcagggtcgtggtacatttactatggtatttgatcactactcaccaacacctaaatcaattcaagctgacatcattaagaagcgcggcggagatgctgaatagcttccgttaagaactgattaatgcagttagcttaattgaaaacaatttcatataaaaaagagttatcatttttattttgataactctttttttgtaaataaatttaagaaaaaagtcgtaaacccttgatatttaaggagggacaaagtacaatagtctttgtgcttatgggacagtgtgcccttaagtgtgaaaatcgttgtaaagcgttgacacaaaaggttgcggcacgccaggctgcattgccacagtggcgtgcggggaatttttgccgagcgagtcatcttttaaagaagacgttaaggaggtaatttaatggcaagtcaaacaattcgtattagacttaagtcttacgaacatggtattctcgatgaatcagctgctaagatcgtagctactgcaaagagaactggtgctgaaatttcaggtccagttcctcttccaacagaaagaactttattcacagttcttcgttcaccacacaagaacaaggactcacgtgaacaattcgaaatgcgcactcacaagcgtttaatcgatattttgaatccaacaccaaagactgttgattcattaatgaagcttgatcttccaagcggtgtagacatcgaaattaaactgtaatttaaatagaaagaggtgtaaacatgaccaaaggaatcttaggaagaaaagttggtatgactcaaatctttactaaagatggtgtccttgttcctgtaactgttgttgaagcaactcctaacgttgttatgcaagttaagactgttgaatcagacggttacgaagcagttcaattaggttaccaagacaagcgtgaagttttgagcaacaaaccagaaaaaggtcatgctgataaagcaaagacttcgcctaagcgcttcattcgggaaatccgcggtgttgagcttaaggactatgaagttggctcagaagttactgtggatacatttaaggaaggtgacgttgtaaacgttactggtacttcaagaggtcatggataccaaggtaacatcaagcgttggggccaatcaagaggaccagaaactcacggttcaagataccacagaattcctggttcaatgggttccatcattaaccgtgtaccaaagggcaagcgcttgccaggtcacatgggtgtgaagaaagttaccattgaaaacttagtaattgaaaaagttgttgcagacaagaacgtattgatgattaagggtaacgtcccaggtgctaagaactcattaatcgttgttaagactgcttctaaagctgtaaaggctgataaataggaaggaggactagaatggctaatttaaaagttatggatcaaaacggtaaagactctggtgaagttactttaaacgataaggtttttggtattgaaccaaatgaaagtgtcgtttttgaagcaattattagacaaagagccggcaagcgtcaaggtacctcaaaggttaagaatagatctgctgttcgcggcggtggtaagaagccttggagacaaaagggtactggtcgtgctcgtcaaggttctatcagagctccacaatggcgcggtggtggtacagtctttggcccaactccacgttcatacgcatacactatgccaagaaagcaacgtcgtttggctattaagtcagttctttcccaaaagttgattgacaatgatttaattgttttagataagttgactatgtcagctcctaagactaaggaattagtatcaatgttaaacggcttaaatgctgacggtaaagttttaattgtttcagatgataacaatgtacaactttccgcaagaaacttgactaaggttaaggttgttccagttaatggcttaaacgttgaagatgctgttaactatggcaagttgatcttagatcaagatgctgttaagaagatcgaggaggttttggcttaatggacgcacgcgatatcattttaagacctgtcattactgaaaagtccacgaacttaatggatgataagaagtacacattcgacgtgcttttaactgcaaccaagacacaagttcgcaatgctgttgaagaaatcttcgatgttaaagttaagaacgtaaacattatgaacgttcgcggcaaggacaagcgagtaggtcgttacactggtaagaccgctcgtcgtagaaaggctatcgttactttaactaacgattcaaacgacatcaagattttccaagacgataacacagaagacaacaagtaataggaggtcagtcaattggctattaagatttacaagccaaccacgaatggtcgtcgtcatatgacttcttccgactttgctgagatcactaagacaaagcctgaaaagactttacttgaatctcaatcacatactgcaggtcgtaactcatatggtcatatcactgtaagacaccgtggtggtggtcacaaacaaaaataccgtatcatcgactttaagcgtaacaaggacaacgcaaaggcagttgtaaaggctatcgaatacgatccaaacagaactgctaacattgctttgcttcactacactgatggtatcaaagcttacatcttagctcctaagggcttaaaagttggcgatgtagttgaatcaggtgattcagttgacattaagccaggtaacgctttggaattaaagaatatcccaactggtacttcaattcacaatatcgaattaaagccaggcaagggtggccaactcgtaagaagtgctggtgcttcagctcaagttttaggtgctgatggtgattacactttagtaagattacaaagtggtgaagttcgtaagattttgtcatcatgccgtgcaactatcggtactgttggtaatgaacaacactcattgattcaattaggtaaagctggtcgtaaacgttggttgggcaagcgtccacaatcacgtggttctgtaatgaaccctaacgatcacccacatggtggtggtgaaggtaaggctccagttggtcgtcctcaacctatgactccatggggtaagaaggcacgtggtattaagactagagataccaagaaggccagcgagaagttaatcattcgtcaccgtaaaggtagcaagtagtagaaggagggttaattaatgagccgtagtattaaaaaaggtccttttgctgatgcatcattgttaaagaaggttgatgcacaagcagatgcagataagaagcaagttattaagacttggtcacgtcgttcaactattttcccttcctttgtaggtttgactatagctgtttacgatggtagaaaacatgtcccagtatatgtaactgaagacatggttggtcataagttaggtgaatttgttccaacaagaactttccacggacacaaatccactgatgataaagccacaacacaagcttagaggaaggagaaacatctaaatggcagaacaaattagttcagctaaggctgaagcaagaactgttcgcatcgctccaagaaaagctcgtttagtcgttgacttaattcgtggcaagagcgttgctgaagcattagcaatcttggaatttacgcctagagctgcttccccaatcgttgaaaaagttttacgttcagctattgctaacgcagaacataactacgatcttgaaagtgcaaacctttacgtatcagaagcttacgtaaatgaaggtgcaactttgaagagattccgcccacgtgctaagggtatggcttctccaattaacaagagaaccagtcacgtagttgtagtagtttcagaaaagaacgattaagggaggtatattaatgggtcaaaagattaacccaaacggttttcgtctcggtgttatccgtgattgggaatcaaaatggtatgctgacaagggatacaaagaaactttaaatgaagaccttcaaatcagaaaatttatttcagaaaagttgaaggatgcctcagtatctactgttgaaattgaacgtgcagccaacagaatcaacatttcaattcatactgctaagccaggtatggtaattggtaaaggtggttctgaagttgaagctttgagaaaacaattaaatgctttaactggtaagcaagttcacattaatattgttgaaattaagaaaccagatcttgatgctaagttagtagcagatagtattgctcgtcaacttgaagctcgtattgctttcagacgtgctatgcgtcaagctactcaaagagctatgcgtgctggtgccaagggtattaaggttcaaacttcaggtcgtttgaacggtgccgatatggcaagaagagaatggcacacagaaggtcgtgttccattacaaactttgagagctgatattgattacgcttgggtaaatgccttcactacttatggtgaaattggtgttcaagtttggatcaaccgtggcgaaatcttacctactcgtaagaataagccagcttcaaagccagcgaagggaggaaatagataatgcctttagtaccaaagcgagtaaaacaccgtcgtgaattccgtggtaagatgcgtggtgctgctaagggtggtaaatatattgcctttggtgaatatggtcttgaagccctcgaatcacattggattactaaccgtcaaatcgaagcagctcgtgttgctatgactcgttacatgaaacgtggcggtaaggtttggatcagaattttccctcaaaagtcatacactgctaaaggtgttggtgtacgtatgggttcaggtaaaggtgcaccagcaggttgggtagctgtagttaagagagaaaagattatgttcgaaattggtggtgttgatgaagcaactgctcgtgaagctttacgtcttgcttcaactaagttaccaattaagactaagtttgtaactagaagttcggaagtaggtggcgaatctaatgaaggctaaagatatcagagcattaaccactgatgaaatgttagaaaaagaaaagcaatacaaagaagaactcttcaatttgcgtttccaacaagcaacgggtcaattagaaaataccgctcgcttgagcaaagtccgcaagaatatcgccagaatcaagactattctgagcgaaaaagcgttagaaaacaattaatggaagggagctattaacttgagcgaaacaaacgaaagaaatcgtcgtcacgtataccaaggtcgtgtagtttctgataagatggacaagactatcgttgtagttgttgacacttacaagaaccaccctgtttacaacaagcgtattagatattcaaagaagtactacgcacaagacgaaaataacgaagctaaagttggcgatactgtacgtatcatggaaacccgtccattatctcgtaagaagcgcttccgtttagtaaagattgttaagaaatctgtttaatttgcggatttagtgaggggaggattacacagtgattcaaaacgaatcccgtttaaaggttgctgataactctggtgccagagaacttttagttattagagtcttaggtggttcaaagcgtaagaccggtaacattggtgacatcgtagtatgtactgttaaacaagcaacaccaggtggcgttgtcaaaaaaggcgacgttgtaaaagctgttattgttagaactaaatcaggtgcacgtcgtgaagatggttcatacatcaagttcgacgaaaatgctggcgtaattatcaacgcagacaagagcccacgtggtactcgtatctttgggccagttgcacgtgagttacgtgagaacgactttatgaagatcgtctctcttgctcctgaagtcttataattgatagtgaggtgcactgatgttcgttaaaactggtgacaaagtaaaagttattgccggaaaagataaaggtaaagaaggtactgttctttctgttaacgttaagaaaaaccgtgtagtggttaagggcgttaacaagattaagaagcaccaaaagccttcacaaagcaatgctaatggtggtgtagttgaatcagaaggttcaattcacgcatcaaacgttaaagtaattagtagtaaaaaagaagataagtagaagggaggacacacatggcaagttatttagctaaggaatacaacgaaaaggtagctcctgcattagaagaaaagtttaactacaagtcatctatgcaagtacctaagatcgacaagattgttttaaacatgggtgttggtgatgcagtttctaacgccaagaacttagatgaagcagttgaagaattaactttgatctcaggtcaaaagccattaatcactaaggccaagaaatcaatcgctaacttccgtttacgtgaaggtatgtctatcggtgctaaggtaactcttagaggcgacagaatgtacgatttcttgtacaagttaatcaatgtttctcttccacgtgttcgtgacttccgtggtgtatcaactcgttcatttgatggtcgtggtaactacactttaggtattaaagaacaattgattttcccagaaatcgattttgataaggtaaaccgcactagaggtttagatattgttatcgtaactactgccaacactgatgaagaagctcgtgaacttttgactcaatttggtatgccgtttgcaagatagtggaggacattaatggctaaaacatcacaaaaaatcagaaatcgtcgtcctgctaagttctcttcacgcgaatatacacgttgcgagagatgtggtcgtccacactccgtataccgtaaattcgggttatgccgtatttgcttaaaggaattagcacacaagggtcaaatccctggtcttaaaaaggctagttggtagtatacggttaggaggatagcttaaatggtcatgacagatccaatcgcagattacttgactagaatcagaaatgccaacatggcaaaacacgattcagttgaaattcctgcatcaaacattaaaaagtctatttcagaaattttgaaacgtgaaggcttcatccgtgattacgaagttgcagatgataacaagcaaggcgttatcaaggtattcttgaaatatggtccaaatggagaacgtgttatctcaggtttgaagcgtatttctaagccaggtcttagaaactacgttggcgctgaagacttacctaaagttcttaatggcttaggcattgccatcgtttctacttctgctggtgttattaccgacaaggaagcaagacaaaagaacgttggcggcgaagtaattgcctacatttggtaatactgacagaaaggagaacaatcaatgagccgaatcggtttaaagactattgaagtccctgacagtgtcactgttaccaaggaaggcgacaatattactgttaagggcccaaagggtgaattaactagatacttcgatccaaagattaagtttgaacaaaaagatggtgaaattaacttttcacgttcaagcgaaagcgacaaagcacttcacggtactgaaagagctaacttagcttcaatgatcgaaggtgtagttgacggttataagaagactttgaagttaatcggtgttggttaccgtgcacaagcacaaggcaacaagattactttaaatgttggttattcacacccagttgtattgactgcaccagaaggtgtttctgtaaaggcaacttcagcaactgatgtagaagttgaaggtgtttcaaagcaagatgttggtcaatttgcagctgaaatccgtgccgtacgtccaccagaaccttataagggtaaaggtattcgttatgttgatgaatacgtacgtcgcaaggaaggtaagactggtaagtaataagtagttatttttgaggtgaaattgtgatttctaaaccagataaaaacaagttacgcttaaagcgtcatagacgtattcgtggaaaaatttctggtactgctgagcgcccacgcttaagcatttttcgttcaaataaaaacatctacgctcaattaattgatgacgtagcgggtgttacgcttgcaagcgcctcaactttggatgaaaatgtatcagatgcaactaaagtagaacaagctgctgctgtaggtaaggcaattgctgaagctgcaaaggcaaaggacatttctactgttgtattcgacagaagtggttacttataccacggccgtgttcaagcattagctgatgctgctcgtgaaaacggattagatttctaggaaaggagaattaacacatggcaaaccgcaatgattctcgtaacaatcgcagaaacaaagacgatatcgaagatcaattagtcgctgtcaaccgtattactaaggttgttaaaggtggccgtcgcatgagatttgctgctcttgttgttgttggcgacaagaaaggccgtgtaggttttggtactggtaaagctcaagaagtcccagaagcaatccgtaaggctgtagaagacggtaagaagaaaatgatcaatgtacctaaagttggtactactattcctcatgaagttattggtcactacggttcaggtaacattttattgaaacctgctgaagctggttctggtgttgctgctggtggtgccgtacgtatcgttatggatatggctggtatctcagacgtaacttcaaagtcacttggttcaaacactccaattaacgttgttcgtgcaactatcgatggtttgaagaagcttagaactagtgaagaagttgcaaaacttcgtcaacctgaaagagcttaagattagggagatcatagatgactgatttaaagattactttaattagaagtgttgctcaccgtctacctcaacaaagaaagatcgttaaagctcttggtttaggtagagtggatagtactgttgttcttccagacaacgctgctactcgtggtgcattattaaagattgctcacttaatctctgttgaagagattaacaaatagaatatcaaggaggtgccaaattaatgaagcttcatgaattacattctgctgaaggctcacgtcgcaatagaaaacgtgttggtcgtggtacttcaagtggttacggtaaaacttcaggccgtggtcaaaagggtcaattagctcgtcaaggcggtcatactcgtttaggttttgaaggtggtcaaatgccattattcagaactatgcctaagcgtggttttaagaacattaaccgcaaggaatatgcaattgtaaacttagatgatttaaacaagttcgaagacggcagtgaagtaactgtagaatcacttaaagataatggcttagtaaagaaagaattgtcaggtgttaagttacttggcaagggcgaattaaaagttaagttaactgtaaaggttaataaagtttccgcatctgctaagcaagcagttgaagccgctggcggaactgttgaggtgatctaatgttttcgaccttgaagaacgccttcaaagataaagaaattagaaataagctctatttcacgctctttattcttttgctgtatcggatcggtgcaaacattaccgttcccggtgttaatgcgaaggcgatcacgcaggttgcgcaaactggtttagttccaatgctggatactgtatctggtggtggactagataactattcaatattttctttgggtgtttctccttatattacggctcagattgttatccagctgctacagatggatattgttcctacgttagtagaatggggaaaacaaggtgaagtaggtcgacgtaaaacaaatcaagtaactagatatttagcattagttgttgcttttatccagagtattggtattacgttaggctttaacgctttaactcaaatgggtttggtaaagaatcaaacaccacagacttatatagaaattgctattgttatgactgctggaactatgttattaacatggttgggtgatgaaatcactgataagggtctaggtaatggtatctcagtaattatttttgctggtattattgcaagactaccaagtggtctatggcaaatttataaggaagaaattattaataatagtgctagtgatcgttggcaaggcattttgttcttcatcgcggttatagttgcaatccttatcgtaactcaatttgttacatgggttgaacaagctgatcgtcgtattccaattcaatatacgagaagagcgacgatgagtggttctgaaagttttctaccattaaaggttaatgtatctggagttattccggttatttttgccagttcatttattgttacaccggcaacgattttaatggcctttcaaagaacccagggcgatcaacaatggtttaaagtaatgaaccaaatctttagcttacaaactactcctggggtaattatctacactcttttaattatcttatttacattcttctacgctttcgtacaggtcaaccctgagaagctagcagaaaacttacaaaagcagggtgcttatattcctagtgtatggccaggaaaagatactcaggattatatttcaaagatgttgatgaaattatcaacagtaggttcattattcttgggcttagttgctttactgcctcaattggctactaacttttggaatctcccaagttccattggtttaggaggaacaagtcttttaattgtgattggggttgttctcgagttatctcgtcaaattaacggcttgttaatgaagagagaatatgttggattcatcagataggaacggataaatgattaacttaattcttttagggttaccaggtgctggtaaaggtacagcatcagagcgaatcgttgataaatatcacttaactcatatttcaactggggatatgtttagggaagcaatggctaacaagacgaaggttggtcttgaagctaagagttatatcgataagggtaatctagtacccgatgaagttactgcaaagttggttgaggaacgtttaagtcaacctgatattaaagaaggttttatcttagatggttttccaagaaccactgtacaagcagaacttttagatggtattacaaaacgtttggagaaacctttaacaaatgtcattgcgcttgaagttgacgaagacactttgattaagcgtttatcagcaagatacatgtgtaaaaattgtggagctacttacaacaagctttccaagcagccaaaagttgagggcacttgtgatcgctgtggtggccatgaattttatcaacgtgaagatgataaaccagaagttgttaagaatcgtcttgaagttaatgaaaagatgaatgcacctttgaaggacttttatcagaagaaaggcttgctcactgtaattaatggtgaacaaactccagaaaaagtctttgaagatattgatgcggtattgagtaataatcaatagaagaaaaatttgtataattttttatccgtgttataatttcaaagtatatgactgtttaattgcggaggaacaactttggcaaaagatgatgtcattgaagtagaaggtaaggtagttgataccttacctaatgctatgtttaaagttgaattggaaaatggagccacaattttagcacacgtttctggtaaaattaggatgcactacattcgtattttgccgggagaccgtgtgactgtggaattatctccatatgatttaactaaaggtagaattacgtatcggtttataaagtaatataacggagggaaacatgaaggttagaccatctgttaaaccaatgtgtgaacattgtaaagttatcaagagacatggccgtgtgatggtaatttgctcagcaaatccaaagcacaagcaacgtcaaggttagaaatagagggggtgtagtttatggctcgtattgctggtgttgacttaccaagagataaaagaatcgttatcgctttaacttacatttacggtatcggtgaagcaactgccaagaaaatttgtgcttatgctggagtatctgaagatattcgttcaaaggatttaactccagaagatcaagaaaagcttcgtgctgaagttgacaagtaccgtgttgaaggtgacttacgtcgtgaagtaagcatgaacattaagcgtttagttgatattggttcttaccgtggtattcgtcaccgccgtggacttccagttcgtggccaaaataccaagaacaatgctcgtactcgtaagggtactaagagaaatcgttaattttatttataaggaggtttattgatgcctgcaaagaaaacagcacgtaagcgtcgtgtgaagaagcatgttgaaagcggtgtagcacacattcactcaacgtttaataatactttagtcatgattactgacgttcaaggtaatgcagttgcttggtcttcagctggtgcattgggctttaagggtagtcgtaagtctactccatttgcagctcaaatggcagctgaagcagcagctaagagtgcaatggaccaaggcatgaaacatgtagaagtttcagttaaaggtcctggtgctggtcgtgaatctgctattagatcacttcaagcaactggtcttgaaattactgcaattcgtgacgttacgccagttcctcacaatggttccagaccaccaaaacgtcgtcgtgtttaattttgtccttgatataggacgtaacgttttgaaaggggcccagtaatgattgaatttgaaaaaccaaatattaccgttgttgaacaagaagattcttacggtaagtttgttgttgaaccacttgagcgaggctttggtactactttaggtaattctttaagaagagtattacttacttctattccaggtactggacttgtttatgtgcaaattgatggcgttttacacgagttctcaacagttcctggcgtcagagaagatgtaaccaagatcatcttgaacttgaagaaacttgaattaaagtctctttcagatgaacaaaaggttattgaattggacattgaaggtccagccacagtaactgctgatgatcttaaagttgatgcagacgttcaagtcttgaatccggatcaatatatttgtaccattgctgaaggtggacacttgcatatggaacttgccgtaaagaatggtagaggttatgttgctgcaagtgacaataagagtgatgacatgccaatcggagttatcccagttgactctttattctcaccaattaagaaggttaactaccaagttgaatcaactcgtgttggtaagagagatgactttgataagctcacttttgagatttggactgacggttcaatcaagcctaatgacgcccttagttttgctgctaaaattttagttgaacactttaaggtatttgaatcagcagatgcaaatgctaaattcagcgaagtaatggtggaaaaggaagacgataagaaggaaaagaagcttgagatgactatcgaagagcttgacctttctgttcgttcatataactgcctgaagcgtgctggcattaatactcttcaagagttaactgacaagacagaatcagatatgatgcgtgtacgtaacttaggacgtaaatcattggaagaagttaaaaataaattaaccgacttaggtctttcacttcgtcaagaagactaagcttaggtgaataaaggaggcaaatccatggcataccgtaaattaggtcgcgatagtgctcacagaaaagcaatgcttagagaaatgactactcaattaatcatgaacgaacgcattgttactactgaaactcgtgctaaagaagttcgtaagactgccgaaaagatgatcactttaggtaagcgcggcgatttagcagctagaagaaaggctgctgcatttgtacgtgacgaagttgcagatgttcacgaagaaaaagatgcagttgttgttaagtcagcattgcaaaagcttttcagtgatgtagcacctcgttacaaggaccgtaatggtggttacaccagaattttgaagttagccgttcctcgtaagggtgacgctgctccaatggttattcttgaattagtttaatttagagtaacacaacttaatacgtattaagaattatccatgaaagtgagaataagcgtaaagatgatggcgcaagcttagtctagcttagatgataaaaatcatccctcttcatgggtgattttttttgctctttttttctgttacaattgctaataagcgatttaagaaaggaagtggaaaaatgccagtagatagtgctgttgaatttaaggatgtctcatttacctatcccgatactaaaaaagcgattcttgatcagattagttttaaaataaaaagaggttcctggacatctttgataggtcacaacggtagcggtaagtccacaatttctaaattaattaatgggttacttttgcctgattctgctaataattctagaatcactgttttaggaatgacgttaaatcaaaagacagtctgggatgttagggaaaaagtcggtattgtatttcagaatccagataatcagtttgttggagctactgttggcgatgatgttgcttttgggcttgagaatagagctgttcctcgggagcaaatggtaaaaatagtcagaaaagttttagcagacgttggaatgctggattatatagatgcagagccagctaatctttctggtggacaaaagcaaagagtagcaattgcaggtattcttgccgtagaaccgaaaattattattttagatgaatcaacttcgatgcttgatcctaaggggagagagcaggtgctaaaaattattaagcatttaaagaaagagaagaatttgacagttatttcgattacacatgacattgatgaggctaatatggctgatgatgtgatcgtcttaaatgatggcaagattttagctcaaggaactccaactgaaatttttagtaaaactgaaatgttgcaagaaatagggctagacattccatttgtacaaaaattaataaataaattaaatgaagtgggaatttctgtacctaaaaatataaaaacgaaagatgagttgaaacaatatctatgtcaattaaatttgaaaaagtaaattatatctattctcccggaacttcaatggagaaaaaaggattagataatgtttcatttgaattaactgaaaatagttttgttgcattggtaggtcataccggtagtggtaagtcgactttgatgcagcattttaatgcattactgaagccgagttcaggaacaattgatattgctggttatcatattactgctcaaacaggaaataagaatttgaaaaagttacgcaagcgggttagtttggtttttcagtttcctgaagcacagctttttgaaaatactgtgcttgaagacattgaatttggtcctaaaaattttggagcaaccgatgatgaagctaaaagtaaagctttgaaatggttgaagcgagtaggattggatgaatcgatggcaaataagtcgccatttgagttatctggaggacaaatgcggcgtgttgcaattgctggggtaatggctgatgaaccagaaattttatgcttagatgagccagcagcggggttagatcctaagtctcgtaaggaaatgatgaaattatttgttgattatcaaaaagcaggtcatactgtaatcttggttacgcataatatggatgatgtggtcgaatatgcagatgatgttttagtgatggaacatggtaaattaattagacatgatgcgcctaaggcgatttttactaataaaaactggctagaaaagcactatttgagtgaaccaacggctagtctttttgcctcagatttgacgaactttaactttaaagataaaccgttaacactggatcagcttgttaatgaaattaagaaaaatttgcgagggtagtttatgagtaagataattgtaggacgttatattccgggagattctcttatttataaaatggatcctcggagtaaattattagttaccatattatttatattggctatctttttagctaataattcaataacttatgcgattgtgaccattttttgttttttggctgtgatcgctacaggattaaatgcaaaagtatttttggatggcgttaagcctttgattggtttaattttctttacgtcgcttttgcaattgttttttatgactggtggtcatatttattggcattggtggattttttcattatctagctacggtttgattaatgcaatctatatttttattcgttttacattaattattttaatttcaacagtaatgacagttactacaatgccacttgaaattgctgatgcgatggaatggttgcttaagccgcttaagttgtttaaagtgcctgtggataaaattgcgttagtaatttcaattgcacttcgtttcgtaccaacattatttgatgaaacattgaaaattatgaatgctcaaagatcacgtggagcagattttaatgatggtggtttgattcaaagagcaaaagcaattactccaatcttagtgccgctgtttattcattctttagaaacagcaattgatttatcaacggcaatggaatcacgcggttaccgtagtagtgaaggacgaacaagatatcgtgttttaagttggtcaaaatatgatctaattgcattaatctattttgtattgttggtcggattattattaatttttaggacacattaaagatatgacaacaagatataagatgacgatggcttatgatggccatctttttcatggctttcagcttcagccagatcagcgaacagtgcaaggaacaattgaggatgcactgaaaaaaatgactaaaggaaaacgagttattgtgcagggctcaggacgaaccgatgcaggtgtgcatgcagttgggcaagtaattcattttgattatcctgggaagacaataccagcgaatagaatgattttagcgatgaattcaatgatgccaactgatattatttttaataattgtcaaattgttaatgatgattttcatgcacgttactccattaaaggaaaatggtatcgttatcgcgttagtttagatcattttgttaatccatttaaacgtttttatacaggacattttccatatccactagatattgaaaagatgcaaattgcggcacaagatttgttgggaaaacatgactttactagttttgcggctagtggtggtcgaattgaagataaagtgcgaacaatttattatgtaaaaatcacagaggataaaaaagataatgaagtgatttttgacttcattggttcaggattcttatataatatggttcgaatcatggtagcagcgttgcttgagattgggaatgatcgtagaccagtgcatgatttgcagcgggtaatcgcggcaaaagatcgacaagaagtgagacaaacagctcatgccagcggtttatatctttatcatgttttttatgatgaagtaccacaaaaatatcgcttagatcagcatttataattgacattttgcctaaaaggacgtactctaatatagtatgtttgtccacgataggccccggaaacttattgttttcaaactgcaaataaacggaggaatttaaattgcgtactacaccattagcaaaatctagtgaaatcgaacgtaagtggtacattattgatgcaactgacgtaacccttggtcgtctttctgctgctgttgccactattttgagaggtaagaacaagcctcaatacacacctaatgttgatactggtgataacgttatcgttatcaacgcatcaaagattagattgactggtaaaaaggcttcagacaagttctactaccaccactcatcatggcgtggcggcttgaaggccgtttcatacggtgaattgcttgctaataacccagttaagatggttgaaatctcagttaagggtatgcttccaaagaacactcttggtcaccatgaattcatgaagatgcatgtttatgctggcgaagaccacaagcacgaagcacaaaagcctgaaaagttagatattaacaaattaatctaggaggttatataatggcacaacaagctgcatacacaggtactggtcgccgcaaggattcagttgcgcgtgttcgtttagtaccaggtaacggtaagatcactgttaacgataaagatgttgatcaatacattccattccctaacttggttaaggacttgaagcaaccattgacattaactgaaactgaaggtcaatacgacattcacgttaatgttaacggtggtggtttctcaggtcaagctggggctatccgtcttggtatcgctcgtgcacttcttgaagttgacccagacttccgtagtccacttaagaaggccggtttcttaacccgtgacccaagaatgaaggaaagaaagaagccaggtttgaagaaagcccgtaaagcttctcaattctcaaagcgttaatatttacgttcaaaaatgttgttatatcaacgttttggagacttcagttggtcacctatggtcacaatgctatagggattccaatagatttaaagcattcgcatcttgcgagtgctttttttctggcattaattccagatagtatttttcagtagttaagattgaatcgtgtcctaatcttctgctaacataagataaaggaatattattactgaataaaaaagaagcgtgggtatctcttaaaccatgaaatgtggttgaagggatgcctatttttttgagcaattcttttaacataccagactgtttaaagctgaaccagtcaaacaaatagccagaatctttttgagagatatccttcaatagatcgtaaatattcttaggaatagtcacactgcgtctagaatgtttagtttttaatttagtatcgtcagtagtagggctaattgatcgttttacttcaacgcaataatactgaccatcgtaatgcacatcctcaggcttaatacctaaaatttcaccacgtcttaaaccagtactaatctcaagtaataccattaagttaaattcattatctgtatgttcaagtaagtaatgttttaacttagttagatcagacattgatgaagctttattgcgtttaggtaattcttttccgtgtgctttaagtaaactagcaaaatcattgtaaatgtatcccttaacataagcatagcggagagcagttctaattttcttaagtaattcagttaccgttttcttagaatgtgttttgccatatttatctaagatactttgcatttgtacgtcatcaagcttaccaagtttagcggttggaaaaagattatcaattactttaccagctttaacataattatcaaaagttgcttttctaacgtcatgtacttttactgtttgaacgaataaataataaaagtccttgaataaagtgttttgctgggctattgcttgacctttagccttttgtagttcaagagtagtactccaaactttagcttctttttcagttttaaaactcttagttaagtaatcacgttttccgagactgtaaaatagtttgtgtaaggatgaatgattccttaaatttatttctttaaacattagaaaaaggagttcctttctcgtatgattggtttgaacaaaaaaacacatacagaaagaagaactccttcatgaatgattttaccaaagattttgctcaagctctattcaatccagacaaaataaatgatttattgcgcaaagagctacaacaggctgttaataacttgctagaagctgagttgactgcctttctaggctatgatccctatgccagaaatggctggaatactggcaattctagaaatggtgcttatttccgcaaggttgatacccagtttggaccaattgaagtgcaagtgcctcgagaccgcaacggtcagtttcatcagcacacgctgcctgactacaagcagcactctgatgttttggaaagcacgattatcaagctatactccaaaggcgtaactaccagagaaatcgctgacttgattgagaaaatgtatggcagtcattatagtccagctcaagtatcaaatatttccaagcagatgctccccaagattgaggcttatcacaagcgcaagctaagcgacaagtttttctgtgtctatttggatgcgacataccttcctttgcgccgagaaacgtttgagcgtgaagcagtatatattgccattggcattaaacctaatggacataaggaagtcattgactactgcattgctcctagtgagaacattgaagtttggacagagatgcttcaaaacatgaagtccagaggcttgaagcaagttgagctttttctttctgatggtgttgttggcatgaaaacagccttggccaggacttatcctaaagctcattttcaacgctgcctggttcatgtcatgcgcaatatctgcgctaaagtacgcgtcgacgatcgtgaaaagatcatgaacgaattcaagcagatacatcaacagacaagcaaaaaagaagctgcagctgtcttgcacaaattctatgccaaatggaataaagcttatagccatgtcatcaaaggtttgaaggaaattgagcccgatctgctagtcttctacaattatcccaaacaaatcagagcttcaatttattcaaccaatatgattgaatcctttaacaacgtcatcaagcgtaaagctaagcctaaggcagaatttccaactgaacagtcgcttgatgcatttattggcatccaggcaatgagctacaatgaccgttatttcaatcgaattcataaaggctttggtcaggttcaggacaccttagaatcctactttgattaaataaataattaaaaaatcaatttacgagaaagatctatttacacaaaagatttgacagtttccgttttccatgttgatagattgttactctggctctatatgatgagccacgtttttcaatacttgccataaatttaatcgtcctttcaaaagaaaagccgattatcttaccagcaataaagttagcagataaccgactatttctcaaatctttttcaattttgtttctttaagatcgatgaaagcttcgatacttttaatggtaaagcgttctgtgtgttctcctagtttaaatcttttaaagtcaggatcagagcgaaatactttatcaaaagttttgggatcaataccaatatattttgaagcttcttcgcgagttaataatttagccactattattctcctgagattgtttagttaccaatattgagataaaatctaggtagtaggtaatctagtcattgcttttgtctctattagcatgactagtatttttttgcgattttatcttccaaattgcttcggataatttatcatcagtgattagatcatttttaactttattagtattgcttttagtaagttgcaacgggataattcgtcttttcaactgttcaaaagaatcaatgacttgattagcaatattacattcaagataaaaactaagtggatcataaggggtagtgatgtaaatggcacgcgcatttagataacgatcgtgataccttgcgggagccattttgtctatttcccaaggatccaaaagggtaagtagttgaccatagtcatagtcatttggtcgcaagtcattaattactatgaatttttgccctttgtattcttgaaagtgatcccgttgactacctgaaatacagaaatcttcaggatgttgtttttctaaaatttcccgtactaacttagtcttaccaattccggaaacaccatatatccagtagaccttacaactctgacctttgaagtcctttaaaaaccgttgatgctttttgtaagctaggatgtcttcaatatgatctaacagtgttttatgttttgccatctcaagaacaccgatttcttcttgaagttcttctttagtgattttttcatttgaataatcatcaataaagttttcaattgcttgtcgtgatggctttttgactttttgtctaatctcattgattctatctttaaaatcaaatgaagctactacttcttttggatcataatgatgtttactcttagcattagtagtttcatggatcagatagctatagccattgttaataatactgtgccatgcttcaatatattgttcatgatcattgaaaatcttagatactcttgaaatggttttagcatctttgaaatgaagcattacatgatagtgaggtcgaatcttttaacttatctttactaaatggtaaatgatctaaatcttgggtatacataaagttgtgagaacgtattatttttttcacaattaaagatttcctttctattcaacacgaactacatattaactttggggctagataacaagttcattattactttatttttgtttatcagatggaaagcaattgcaagaagcagcagatatattagccaaggctaaggtgcatctatctatggtgatattttcaccttaaatcaaactgcagcagctatggttaaagttgctcaaggaggtaataagggtaaagtattactgcaaatgaatgaagcttaagttaacatgaaataataaatacatttagataaagaaagaccctcaaagattctaaatttgaatttttgagcgtctttttagattgctaatcattttaaaggtacttgtattacatttactcctgctttaataaattcattaattacactgttttctacaaaagtatcagttattaataaatcaatatcttttattgttccaatagtaaaattagagaatttattgaacttgctatagtcggcaacaacaataaccttttgtgattgctgaataatagttttattaacttctgcttcttccataactggtgttgaaataccttggttaatgctaattcctgcgcaaccaataattgcatagttggcacgtaaagatagaaatgctttagttgccaaatcaccgctcatgattaatttatgatgtatttccccacctgttaagatcactttgcttttagtattttcaaaatttccagcataaccattgttagtaacaattattatatcctttgttaataaatgtggaattgcatcaaaggctgtactactagagttaataaatactatatctccatcgtgaatatatctggctgcctcttttcctaagctttgcttaatgtaactaacgggctgagataatgggatttcttctggtgcaacaagggatatgacaccacgcttttttgaaatcttacccatttttgacaaataatcacagtctcgtcgaatagtcatttcagaaaccttcatctttttgcttaattcagaaatagaaatttcccttgtgtgatttagtaaatcaatgatttgcttgcgacgttttttaattacttgaattgaatttttcatttttaatgatctctttcacttcaataaatacttactaatacttcaccagaaaagcattaacttttgaatttaaataaaaaacgccccgaactggttactattttaccattcaaaataataattcacatattttatgttataaatgacttgaattttacaaaaattaacataaaatatgctaaattaacatatataatggttgaaagcactcacatctaagcgcataataacattgaagacgaggataagaaaattaaggaggatttattcatgtcagcaccaaaaaaaatagaagatgttaatttcaaaacttttgcagaaaacaatttcccagaatggggtacgttcttgaatgaacaaattgctgataagcaagtaccagaaaaaagtattgcaatgtggtggttaggctgtatgggggtttggattaagactcatgaaggcaccaacgttgctattgatatgtggaacggtactggtaaacatactcacggtgacggtaagatgcgtaaaggtcaccaaatgatgcgtatgaccggtggtgaagctttacaaccaaaccttagaaacaagccatatgtaattgatccatttgcacttcgtgatcttgatgctttatgtgtaactcacactcaccatgatcacttggatatttacactgcagcatgtgtaaacaagtattgcccagacgctaaatttattggacctcaaggcgttgtcgatgaatggatcgaatggggtgttccaaaggaaaagaccattgttgtaaagcctggcgatgaagtcaaggttggggccgtaactattaaggcaatggaagcctttgatagaactgaatttgttaccgaagatgatccaaacaagaagttagcaggtactatgccaattgaaatggctaaagttgctgttaactacttagttaagacttcaggtggtaacgtatatcactcaggtgactctcactattcaaacacttacgtaaagcacggtaacgaaaacgaaattgacgtaactctatgtgcatacggtgaaaacccacgtggtatcactgataagcttgacgactcacaagttttgagaatgggtgaagctttaaagacaaaagttattattccaatgcactatgacatttggactaacttctacagtgatcctaaggatattttagctctttgggaccgtaaaaagtaccgtttgcaatataaatttaagccatatatttggcaagttggtggtgaatttgattatccacaagacaaagataatttcgaatacatgtatgatcgtggattccatgatgcatttaagaatgatccagacttaccattcccagaaatgctatagtcccgtttttgttgattaactagctcaacgtctttaaccaaagctgttgagctgagggaggagacgctgatgttacgttactttttagaaaataatttattaaacattactgatgaacatcctgagacttgggaagaagcaattagagttgctggtaaggtaatgaagcaagacaagttagttactgatgattatattgattcagttattgctgatgttaagaaatatggtccatacattgttattgttcctggtgtggcaatgccacactcaaaggctgatagcgaaggagttttaggtactggtataggtcttacaattttgccagaaccagtttcattcgatgaatcagacccagataaaagtgcaaaattattctttatgctagcagctaaagataataatacacatgtcaaaaatattgcccatttatctgacatgttaatggaagataacatgattgatgatctttctaaggttaagaatttagacgattataaggcagtaatgaagaaacataatatgtgatatcggaagcggggagtataaatggctatattaaatattctatctaagatatgggattattttgctaccaatattttgcaacaaccagctttcatgattggttttattgtcttacttggttatatcttagagaaaaagaaatggtatgaggtcctttcaggcttcttgaaagcaacagttggatactttattttatcggctggttctgttggactgatcaatacttttagaccaattttagtcggattaaaagatcgttttcatttgaatgcgatggtaactgatccatattttggacagaatgcagttactgccggaattatgaaagagtttggtagatcttttgccgatactatgcttttgttgttatttgcatacattatcaatatcgtgttagtaagattttcaaaatatactaaattacgtgctgtttttacaactggtaacgtgcaagtacaacaagcggctaccgctttctggttgatcttgttctgttttccaaaattaggtcatttacctattttaatcgttatgagtattatcttaggtttatattgggccgttggttcaaacttaactgtagatattactcaagagttaactgatggtgctggctttgctatcgctcaccaacaaatgtttggtatctttattttcgctaaattatcagaatttttggaaaatagagccaaaaagaaaggtaagaaagaagccagacgattagaagatgtaaagttaccaggtttcatgtcaattttcaacgacaatatggtatctacatcaattttgatgttaatttttatcggtgcaattttagtagtattaggtccagattacttagttaaagctaaatttatgcaacctggccaaagttttattttctacatcttacaaacttcattacaatttgcagttttcttagcaatcttacaattaggtgttcgtacattcgttaatgaattgactgaatctttcactggtatttcagacaaatggttacctggctcagttcctggtatcgatgtcgcagctaccttaggttttggttcacctaacacaggtacaattggtttcttgtttggtgcattaggacaattcacaatgatcattttattgttgattttccactcaccaacaattgttatcgccggatttatcccgttattctttgataacgctgctatcggtttgtattcaaataaccgtggtggtttcaaatatgcaatgatcatgccttttatttctggattgatccaaataggcgggtctgccttaattgctacctgggtaggtatggcgaaatacggtggttacatcggaatgttcgattgggctacagtttggccattcttcacagtattgatgaaattcttaggctttgttggtattgctcttgtaataatcattttggtaatgattcctcaattgcaatatcgtgccgataagaaaggttacttcatgattactgaagattatgaaggttggaagaagttacatggtaaagaatagaggttaattaaaatgaaaataatgtcagcttgtgctaatggttcgggaactagtttaatgctttctagaaccgcaagaaaagcaatggaacaattaggttatgaaattacagtttcagatcatacttctgtttcagaagctagaggaactgctagaaactatgatgtggtatttacatcattaccttttgtgaacatgtttgatgaagtaaagcaaaagggtggcgaagtaattggcgttaagaatgtaatgtcagttcctgaagtaaaagaaaagatcgaagcttcagatattccaaataagtttaagaaataatcttaggagaattaatttatggctttaccaatgttacaagttgctttggattgcgagagtactgctgaagctttaaatgtcgcaagacaagtaatggatcaagttgatgttttggagacaggaaccattctttgttatcaagatggtgtaaaggccgtatctgctttaagagcagtgggaccagataaaatagttttagcagatgttaaatgtgctgatgccgggactaagttcggtaaggcaagcaaagatgcaggtgctgattggatgacttgtattaacgctgctactgttcctaccatggttaatgctagaaaagaaattgaagttcaagttgaattatatgaaggctgggacaataaagaacgtatgcaagaatggcttaacaatggtattgatcaagttgtttaccaccaaagtagggatgcaaaatttgcaggccaaaaatggggcgaaaaagatgttgcaaacgttaaggccttgattgacatgggctttaaggtttcagtaaccggcggagttcatccggaagttttgaaattatttaaagacttaccagtgtattgttttattgccggccgtgatatcagaaatgcggaagatccacatgcgcgtgctaagcagtataaagatgaaattaagcgcatttggggttaatcattaattttactcatattaaaaaattccttaattagttttagaaagggcaatgcacgtaaaaacgtttattatgcattgctctttttgtattaaaaggcaggtataggttatgactgtaaactcattaggtatttacgaaaaagcattaccacaagatttatcttggaaagaaaaatttaatttagttaaaaaattaggcttcaattttttagaattttctgtagatgaaagtgatgcacgcttagcacgtttggattggaccaaggaacaaagaaaagaatttagagatttaatgtgggacactgacattcgaattaataatttgatgttatctggccacagaagatttcctcttggatctaaagatccagaaaccagaaagaaatctcttgaaatgtgccaaaaggcagtagatctctgtgtagatttaggaattcataatattcaaatggcaggctatgatgtttattatgaagaaaagagtgagaactctagagaattatacgttgaaaacttagctaaatgtgttcatatggctgcaaagaaaaacattatgctttcgattgaaacaatggatgatccatttattactaacattgcagatattaaacaatataaaaagcaagttagaagcccatggcttcaagcctatccggatttgggtaacctctctgcttggccacaaaatgatcctgctaaggatttagagaatggaattggtaatattgttgccatccacttaaaagatactctggcagtaacagatggttttgagggtaagtttagagatgttccatttggtgaaggctgcgttgattttgaaggactacttcgtgaattagtaagactagactataacggaagttttacgattgaaatgtggccaggtgataacggtgatgatgatcctgttgctgaagttaaagaggccaaagctttctttgacaagatctttaaaaaagttggaattgaacaagaacctgtagattagaaagtggaaaataaaatgttagaagatttgaaaaaagaagtctatgaagccaatatgcaattacctaagttaaatttagttacttttacttggggaaatgtttcagggattgatcgtgaaaaaggtctgttcgtcattaagccatcaggtgttccatatgaagaattaactcctgaggatatggtagttgttaacctaaaaggtgaagtggttgaaggtactagaaatccatcttcagatactcctacacatacctatctatataatcattttcaaaagattggtggtatcgttcatacacactcaccttgggctgtttcatttgctgcagctaagatggatattccagctttgaacaccacacatgcagatactttctatactgatgtgccagcagctgatgcattaactaaagaacaaattgaggaagattacgaaggtaatactggtgtcactattgtcaaaacctttaaagagcgtggtctcgattatgaagcaacaccaggtgctttagtttcacaacatggcccatttacttggggtgaaacaccagctaaggctgtttataatgctaaagtcttagaagttgtggcggaagaagactatcatactttgcaattaacacgtgctaattgccatttaccacaatacctacttgataaacactattatcgtaagcatggtaaaaatgcttactatggtcaaaataatgctcattcaaaagatcatgcaaagcgtgcctaaaactaaggggtaaaaaatgcttgaaaattatttttttgattttgataaaactctggctagttcaggtaaggcgtcattgattgcgacaaagcaggcatttaagttaaataatttagatgagccagatgatgatcaaattttagattttatgggtattcctgctgatgtttcattccctaaaatggctaatagagaattgtcagaaagtgatgcgaaaaaattagttgatacctaccgtaatatttatggaaagtatgaaaaagaaaatacacatttatatcctggaatgcgagatgtactagaggatttacagcaaaaaggtaaaaatttatttgttgtatccagtaaaagtcatgatattttaaagagaaatttagataatttgaaaattactcaatattttaaagactttgtgggatgcgatgaggttcagcattataagccagccccagatggtattttgatacttttagacagatacaatttgaataataaacaaagtgtaatggtaggggatgctcgttatgatttgcaaatgggcaaatcagcgtctgttaaaacttgtggagcagcttgggatgcttttagtgtggatagcttaaagaatgaacatcctgattatttgctatttcatgtggcagaattaaaaaatattgaatagagttcatatattttaaaattggatggtatcaattttgaaagtagttgaactctttagcaaaaatgatattattaacttgtaaaggaaaacggttacataacgatggtctataggaggacatcatggctgtagattacgattcaaaagaatatttaaagagcgtcgatgcttattggcgtgcagcaaattacttatcagttggtcaacttttcttaatgaaggccccacttcttaaaacacctttagttgctgaagatgttaagccaaagccaattggtcactggggaactattgctccgcaaaactttatttatgctcacttaaacagagtgttaaagaagtatgatctggatatgttctatattgaaggttcaggtcatggtggtcaagtaatggtttctaactcatatctggatggttcatacactgaacgctatccagagatcacccaagatgaaaagggtatggctaaattgtttaagcgcttcagtttcccaggtggtgtggcatcacatgctgctcctgaaactcctggatcaattcatgaaggtggggaattaggttactcactttcacacggtactggtgctatcttagataatcctgacgtcattgctgctgttgaaattggtgatggtgaatcagaaactggtccacttgcagctagttggtttagtaacaagtttattaatccaattaaagatggtgcggtattaccaattttgcaaatcaatgggtttaagatttctaatccaactattgtttctcgtatgagtgacaaagaattaactgaatacttccgcggcatgggctgggatcctcattttgtttcagtctttaaaggcggtcgttttgacggtgaaaaggatccaatgcaggttcacgaagaaatggctaagactatggatgaagtcattgaagaaattaaggctattcaaaagcatgcccgtgaaaacaatgacgctactttgccacattggccaatgattatctttcaatgccctaagggctggactggtccaaagaaggatttggatggcaacccaattgaaaactcattccgggctcaccaaattccaattccagttgcacaagatgatatggaacataaggaaatgcttgaaaaatggcttaagagctacaagccagaagaattattcaatgaagatggttcacctaagaagatcgttactgaaaatacggctaagggtgaccacagaatggccatgaatccagttactaatggtggtaagaaccctaagcgtttgaacttgccagattaccgcaagtacgcattgaagtttaagccaggtcaaatggaagcacaagatatggttgaatgggctaaataccttagcgaagttgctgatcttaacccagacacattccgtggctttggtccggatgaatctaagtcaaaccgtttgtttgcacttcttgatgatcaaaagcgtcaatgggaaccagaaattcatgaacctaatgatgaaaatctagctccaagtggtcgtgtaattgattcacaattgtcagaacaccaagatgaaggattccttgaaggctatgttttgactggccgtcatggcttcttcgctacttacgaagcctttggccgtgtagttgattcaatgcttacccaacacatgaagtggttaagaaaagctaaggaacaatactggcgtcatgactatccatcacttaactttgtcgcaacctcaactgtcttccaacaagaccacaatggttacactcaccaagacccaggcatcttgactcacttatatgaaaagaatcgtccagaccttgttcatgagtacttgccatcagacactaatacgcttttggcagttggcgacaaggctttgaaagacagagaatgcatcaatgttttggtaacttctaagcagcctcgtccacaatggttctcaattgaagaagctactaaattagctgataaaggattgagttacattgactgggcttcaactgatcaaggctataagccagatattgtatttgcttcaactgaaactgaaccaactttggaaagtttagctgcaattgatatcttgcacaagcgtttcccagaccttaagattcgttacataaatgtagtagatgtgatgaaattaatgagtcctaaggataataagaatgctatctctgataaagagtttgatcgcttattcccaagtgacattccagtaatctttgcatggcatggatacaagactatgatggaatcaatctggtttgcaagaaaccatcataatatacatattcactgttacgaagaaaatggtgatattactaccccatttgacatgcgtgtcctgaaccaccttgatcgtttcgacttggctaaggatgctgttgaaagtattccatcattggcaggtaagaatccagacttcatcaatgaaatggatgacttgcttgctaaacaccaccaatacattcgtgataatggtaaagacattcctgaagtcactgagtggaagtggacaggtcttaagtaaaaaataaagtgtctgggaaaaaactaactcttagaccataataataggacgatcaaaattcttaagtgagttttaatcgtccttttttcttttaaaattaaataaaaacggtcttttggtcattttctgttccaatatttgcttatattcatcatcatgaaggctattccaacatcggtttcaactttctttttgcctcttagatgtgtttgccttcttcgctttgaagaacttcttttgctttttcttttaaatactgccagttagggttatagcgtacttgacgctggcgaccgctagctgtcttagctaattgttccagttctgacgtaagcttcaactgcctggcccttcagcttatcatgatacttttcgacagccttgcgccaaacaaaagtgtagcggttagcatcagcttcaattttagtgccatcaataaaaacagccccctcgttgatcagccaacagattggtaaagtagataaagctcttcttaaccagttcattggcatgactgctgtgtggtatactggtcgacctgttttagcagggtgtaaagcagaatagcttctggaatcgaatccacaatccagctgatagcattagccaagtgattgctgggaatggtaaaatccaaattgagtgttaaagctgtttgacctgtgatatgatttttgtacatattagtttccacctttttgttttaatgaaataagaggccacaaatgatcacattttttatggagaaatttaaaatgttaaattttagatcatatgaagacgcagatttcgaaaaattatgcaacatccacgatcaagcgcgaaagcaagaattaaaatttgccaatcttgaagctgcatttattccattcaaaatagcatcaaagaaagagcaattatttgaagactatcaagtttacgttgcaacaaaagaaaataaagttgttggttttgtcggatttaacgaagaagagcttggctggctctatgttgatcctaaagttcaaggacaaggtattggtagtaaactgattgattttacgcttgaaaattcgaccaggccattttatttagaagtgcttgagggcaatcctgcacaaaagctttatctcaaaaaaggtttcataacaattaaacatgaaagtggcaagatgccaggtaatgaatcatttagtgttgaagttgacctaatggaatataaataaaacatcccaatcaggtgtgttttttgttagacttataaaaaatgaagctagtcaataaagtattgtcttgtcattagaaagtactacatatgaagtatatttcatgaagtccgcttcatattttagggatgatgattatcaataataaaattaaggaataccgcaaaaaacatcaacttacacaacgcgagttagctgaaaaagttggtgttacagaacggacaataatttcattagaaaagggtcggtacaaaccatcgattgttttagcttataaattagtacaattttttgagacagatattgaaactttattttgcttaaatgagtatgtgaagaatgagcaagccaaaggaaggaatgcttacaattctttttgcgattctatcagtcatacagctcttagaattaatttatgatgttgcaaatagaaaaagcgtcaattatattcaagatgttatttggttaatattgggcatctgtttgacagtcggttatttctatagtactaaatatatcggtatagccaagattgaagaagatgatgaacgcgataaatttattcaaactaaaactaataatcaagcattcaatattttacagtgggtcctttttgttttaggtgcagtaacgataataattgatgttaatctcggccaaatgggattagattctcgtgcaatggttattatagttgtaggcgttgtattaatctttttatgggcattttcttggattttgcaattaatcttaatgataattaattatttttgcaattgagactacaaaaaataaagcgactggattagctctggtcgcttatttaaattttagtatggcatttctttaaaaaattagaatatcgatctttttcaccgtttaccttccaatattaaccattcaccgaaatttttaaatttaaaatattttttcgtctatactgataagcaagaaaggagaaaaagggatgaaggtaaaatttaacattgataatcaattagcgggagaaagtgctgaattttggttaaaaaagatgactaataaattcagtcaattgggtaaagaattaagtggtgaacaagacacgatttggtgcagttatgatgatgaaattattcctgtgaagtttgaaaatatttatttaattcaagtcgaacaagagcaaactttaatttatgacaaaacacagagttacaggtataaagggcaattatatcaggttaaaaatattttgccacataattttttaatagcgtcaagaagtgcaattattaattatcaaaaaattgatcatttggaagttatggatggtggcaatattgatgtcattatgaagaaccaaatgcgggtacaaatttctagaagaaaaattaaagacttgaaagagaggttagggttatgaaaagaatggaatctttcttggtaagtggaataagtggcatgggaattggattaacttggtattcaatagtaactttatttcaaacgggaacgaattggaaaaatgctcaaattccgtttacaagtttgctcttttatttgattgtctcttttgtgatgggagcatttttcaatttgacaggattgatttttgaacaaacgcaatggtcactacgaaaacaaattattgtaaacttttttgttagctatgttgccttttttgcttttgaattagtgattaatgatttggctttatcggttcatttcttcttagtaattactggagtatttgtcttgatgtacttgctcgcttatggtttgtactttttacaattattgcgagatgttaaacaaatcaatcaaaaattgaaagaaaagtaaataatcaaaaacgatcaagcctaaaaatcttgatcgttttttcgttggttagataaaaattataaactgtcttgaatattatcagctaagtagtcataaagcataccatgctttaattgcttagtatcaactcccaaagcttcagcaattgcataggcaaaggcccaagcggtagcaggaccacggcttgttaaaattttatgctctttatcagtaacggtgattttctctgaaaaatgagcacttggggcatcttttaagcattcttcttcaatgcctggataacaagtgaagtccgcatctgccaaaacaccatagcgagcaagagcacgtggagcagcacacattgcggcatcccacttgccagcttcatgacgcttaatcatcagatcacgtaatttttcattatcgcgtaagttagcagaaccagtcatgcctcctggaaaagcaaccaaatcataatctaataaactgtcatctacaactttgtcacaagtgatttcaatatgatggtcaccatctacttttttacttattaaacctaccatatcgcattcaacgttaagtctacgcaatacgtcaacaacgcttaaaccttcgacttcttcgcaaccgtctgcaaatactacagcaacttttgtcataaaatcatcctttctataactattttaattatctacttacattagatctaagtaaaatgaaagatctgctaatttgcttaaatgaagagtaggatgaggtgaaattggtatcttgtcttttttaggtgccagccataatgattttagattggcattttctgcaccttgaatttcttcatccagattagttccaattactaaaactgtgtctggatcaatatctggattgtctttcagaatcttaaagaaaatatttttgcttggcagcttgtccgtaaaatcatcggcgaaataagcattgtcaaatgaagaaagcaattctgtaggtgcaaggcgcggttcgatttgagtgcgcttttctttagcaagcaaaatcaaatgcagcttgccactgacttcatcaataaagtcgatggcgcccttgactaacctggtttgatccttcattgcatcatcaaaaacagttcgcgttttagaaagatcttcttttaaaaatgtagataaagctaaatcgatttgatcatcgctagataaatttttaaattctttttctaagctagtgtagcgtagtcgctcagctggtccccagtctaacccataatgttttaaagtttgccgcagcgcagttttttctgctaatttttcatttaataaactgccttctggaatgaaaattaaggtttcaaatgtagtcatgaataaacttcctttgtgttagttcctattagaattataatgaactagacaattttaggaaaggaattaaaaaatgacaatctggaccgtaattttcttattattaggtggcgttgcaggtggcttattatcgtcagtggcctcaatggcatcacttgcatcatacccagttttgctagcagtaggaattccaccagtatttgctaatgtaactaatgatgcggcgctaatttggactagcatcggttcaactgtatcttctactaaggagttaaaaggacattggaagcaagttttgttctataccatttttacagttgtgggatcaattttgggttgtattttgcttctatcttttcctccaaagatttttgaaaaagcagtaccattctttattgctttctcaggattgatgattattgtttctggtaaacaccatagtttaaatactaagacacagcctacttggcttaaaataatttattttctcgcacttttagtcatggggatgtatacaggttactttggtgcagctggtggagtcatcgtactagtacttttaacttacattaccaatgataaatttattgttattaacgctatcaaaaatgtgatttgtggttttgctaatttagtagccttgattatatttatgtttacctctcatatttattggcttcaggcaattcctttggcaatcgggatgttcattggtggctatattgggccagctattttaagacgagtaccggaaaagccagttcgaattttcattgcaagcttggccttcattcaagccggttacttcttttatacggcatatctgcaataagtttggtacaatattaagcaatgaaaagggggctaaggttgatggcaacagaagtttatttggtacgtcatggtgaaacaatgtttaaccaattggacaaagttcagggttggtgcgattctcctctaaccgtgaaggggattaacgatctaaagagaaccgctaaggccttgagtcaagttcactttgataacatgtattcatcggatttgaagagagcaattgataccgttcacttgatgaaggatgctaatgtggtctcggatattggtaaaattaaaaagctgcctgaatttcgtgaggtcttctttggaacttttgaaggcgatgatattaaccagacttgggaacaagtagcactagccgcaggaattgaccatgaagatgatgtaactaagatcatcaatcaggtaggcttgcgcaaatttcgtgcagcaacaaaaaaggctgatccgcgtcatttagcggaaaatcaggatgagttagatgagcggatggtacgggcaattgacgttttgcgcgatttaactaaagatgaacaaagagttttgttagttagccatggtgactttattaaaactttgtccataaaatattggaataagagtaatggcaaaaacgatattgtttttccaaataatgggagcgttactcgtggaattttgcacgatgacggttcatttgaaattgttgattataatgtagatgctgaagagctataaaagtcctactgccgaagtagggccttttttggtacactgataacgaaaggaaaatattttatgaataaagatcatacaactaagcgttatgtcttcgtaactctactgaatgttgttattactattgctgaatttataggtggtattttttcaggttcattagcactgctttcagatgcatttcataatctgagtgatgttggtgcaattattttatcttttgtggcgcacctgattagtcgcaaaagtcgtaatcagtttaagacctttggttatgaaagagctgaaactttagccgcttttactaatggcgttatcttgatcgtgatcagtgtggttttgtttgttgaagcaattcaacgtttctggaagccggaacatattcacggtggcattatgctgattgtctcgattattgggctggctgccaatattatttcaatgctagcaatgcatagcgattccaaggctaatttgaatgtacggtcaacttttattcatatgttaagtgatgccttgtccagtgtagcggttgtaattggtgcgatcttcatttacttctggaatgtaacttggcttgacccagttttgactattttagtttcaatctttgttttgcatgaagcttatgaaaatacaatgaaagcagccaatgttttgatggaatctaatcctgatatcgacttgaatgaagtgaacaagattgttttatcgttccccatagttcaaaatatccatcatgtccatgtttggcgctacagcgatgactttattatgatggacgcgcatattaatgtagccccaggattaagagccgatgaattagagcagctataccaagatattggacaggagttacaaaaagagttaggtattaatcatattaccttacaagcagagtgcgagcgtggcagaaaagacaagatgatcgttccaggccacggtattaacgaagattaggtgaaagaatgtttaatgttaatatttttacagcgattattgtattgattatgggtatttatgacatgtcctatgcttttaataggcgtaagcaacctaccaataaaggcggcattagagcctttatggctttaggaattatcttcacgatcgcaggaattgttatgatcgttagagtattaatgaagtaaggaatcttagaatggctaaattagtattagttcgacatggcgaaagtgtggcaaatgctgccaatgtttatactggctggaacgatgttccgttgactaaaaaaggtgaagaacaagcagaaaaagctggtgaattgattaaaaccatttcggattttgctcccacccacattcatacttcagtcttatcccgtgcaattgtgacagcaaatatagtagccgatgtctgcaatttattatggctaccgatgactaagacctggcggctgaatgaacgccactacggtgctttaaggggccttaataaggacatttcacgtaaagtatttggtgtggaacaagttctattgtggcgacgtagttttgattcagttccacctaagcaggggtcgccaatgattgatcgccgttataagcattttgatcagcatttgatgccacgggcagaaagtttacatcaaactcagaaaagactcatgccatattattatgatcatatcgcatctcgattgatgaatggtgaagaccaactgatcgtagcccacggttcaagtttgcgtgctttgataaaaaagctagagcagattaatgatcatgacatcgtaaaactggaagttcctaatgcggaaccgattgtttatactatggatgagcacttaaagattattaacaaacaaattttacgtaaataatgttaaaaatgcaccttagtgcatttttttaatgctctaaatgaggttttacacatatctatggtaaaatctattatgatttctagtatatttagtttggagtattaggcatgcgtaaattatttttattacgaggtgcacctggctccggtaaatcttcttttattgctcgccatcacttaaatccttatgcgatcagtcgtgatcaaattaggctactattggcggatttgacagtttactatcaagaggatgcggatgttttacaccaagtcattccgcggcacgtaactgtgcgtactgagcaaatggtggatcaccttgtagaacacaagatggaatatggcgaaactgttattgtggatgggacgcatatcgttccaagtgcgattgaacattttaagccttgggtagacaagtatcactatgaatgctttgtagtagatctgatggaacatactaccttagagagtttgcttaagcgtaatcagactagaatgcattacgattgggttaagcctgaagtggttaagcaaatgtatcgttcttatgaagcacatccagaagtaccatactgggcacataaagttgtgccaaatcagatggatcatgcgttgtcacagcgtgagacaaatttagatcgttatgctcatgtgattgcggttcctgacatggtagatgaagaagattttccacatgtgcatatctcgaacttttatttttcatttaatgacaagtttacagaaaagtatggaacttatcgaaatgtagtttcaattgctaaaactgaagatgaagcagttaagcagttcaagttgccatattttgtctttaagtttcatcacaagcactttttgatttcagcttatccaattcgaaatgagatgttggatccgatcagaaaggttaagggagtttggacatattcaactggtttgtataatgtagcggattttgtgaaagaatttccggaaaataaaaagcaacatgtgcatcagttcaacttaagtaagttagatccaacccgcttattacatatttggtaaaaataaaaaaggacttattcacaatcttagtggataagttctttttatctgtttaattcatttaatatttaaaagctaaagcacccattggatcccatggcaataattgaattgggttatctttgccttcatcgtaagccttcttaagatcttctggtaagaatttcttgttaataactgcttggtaaacaaatgaatcaaaccaagaatcactcattacgaagtaacccttaaagccaggtttttcaccccatgagttttcgatcttccatttagttggcttaccatcaacgatatcaacaccggtaatcaccatggcatggtccatcatgctttcaccagaatcaagcatgtcggctttagacatagtgaagtcagcatcaaataattgatcacggcggtaaaggttagtatcaagaagtccagcacggcgttcagaatccttaactacgtttgaaccgaaccaaacaacttcgccactcttcaattgtttaatgattaagtccttcatttcatcaactttaaggtttaagtggcgaacttggcgaccgccttcaacgttacctaagtattcaactgagaataccttgtggaaaggtttgtcgttagttggagcattgatagttgagatatggtttgctaaatccatgccaacgtacttgtcaaagaattcctttggggtaatgtccctgtcaatatggtaattcttgtcatcatcgcggtattcaaagttgaacttctttggtggaatacccaatgaagtagccaaaatacggaagacatcgtttagcatttcttccttgcgagcttgtacttcatcttctgacttgccatcttgaactaatttacgtaactcaagaccatctttacgaagcaaagtatttaaagtgtcgtttaatgcacttgaattagtagcattagcagtttctggataaacactcttaggaacgataccatatttttcaataataccgcaaagcatgtcccattgaccgccgtcttgttgaggagtcgcaaataagaatgaaactttacgatcgcccaagtccttatcagcagttgcgatcacattttcaaagaaccagttagacttttcaaatttatcccagaagttagtgtaattttgagataattcgaagtcctttaacttaaatttcttttgtaatgggtgacgcatagtgtttaaagcactgaacatccagcagcgaccagactgcttttgatcggcagggttacctgtatcaatttcgattgagaaggttggatctaggtcgatcttagtttgtaagttttgactagctttgtagataccgttttcttgagcagcgtgactagccacatcaaaaacagggtggttagctaagtcttgttcaaatttattaatagtatcattgttgatttcttttaccataaaaaaatcctcctttataagtacttaaattaattttatcttattcaaaatgagtcgtctaataatcttatcgattaaatggacgatgataccaaattttgtgaaattgaggatgctgggtgaagtagtcaatgatcataggatcaagcggccaaatgggtaagttagtttcttgagctaattgccaaactttttgcatttgtttttcaagcaaatcctgactattaaattgtggattaataaaaaaatggttcattatccagacattactgtctttgcgagcgattttatctaaggtaacgctagataatagtatgtcttcttcattttttatagtgaaaatttggtgcgtattttgcttattcataaaaaattcctttttaaaaaaataatctcattttttttgcgtaataaataatagagagctatttattttgtgttgactaaaaacattgtaaaatagataactgtcaaaataaaagataaatggagctttggaatgaaaacacgtggatttgaagtagtcaaaaagtatcaagatcaggaaattaatcttcctcgcagacagaccctagccagtgcaggctatgacatcgaagcggctgaagacattactatccctagcatttggcgactaaattttgtgcgaatttttaggttgattagaaatggacaccagctgtatgagcgcgactatgagatggcggatcagattttaaagccgttgttagtgccaactggacttaaagcttatatgccagaagatgaagtgttgattttagctaatcgttcatctaatacttttaagcgtaatctagctttgccaaatgggatcggcgttatcgatgcagattattacaataatcccaacaatgagggcgaaatttttgtacaaatgattaattatggcgtacggcccttgcacatcaagaagggagaccgtattgctcaaggcatttttatcaaatacttgaagaccgacgatgatgatccaattagtcgaaaaagagttagcggctttggatcaactaatgaaaagaagggtgattaatggctagagtaaaaacacaatataagtgtcgttcttgcggctatatttcggcaagttatttaggccgctgccctaactgtggtgcctggaatcaatttgaaaaagaaactgaagaagtgcaaaagcgttctactaaggcaactgctagtcgtttgattcagaagactggattaaatgaaccggtaaagctggataagattaaagctgaaaaagaagaacgaattgtcactaaatctgaggaattaaaccgcgttttaggtggtggtattgtgccaggctcactagttttaattggtggagatcccggaattggtaagtcaaccttgatgttacaaattatgagtgacttatctgaaaaatataaggtgctttacgtttcgggagaagaatcagctaaccaaatcaaattgcgggctgaccgactgggtgtaggtcaaagtaatatgctcttatatccagagactgacatgcatgatattcgcgaacaaatcaatgatgttaagcctgactttgttgtaatcgactccattcaaactatgaatgaaccaagtcttgattcgatgactggctctgcctcacaggttcgtgaagtaacaagtgaattaatgaaaattgccaagatggatgccattacagtttttgttatcggccacgttacaaaagagggtgcgattgctgggcctaagatcttggaacatatggtggataccgttctctattttgaaggggatgaacaccattcttaccgaattttgcattctgttaaaaaccgttttggagcagcaaacgaaattggaatgtttgaaatggttaatgaaggcttaagagaggtaactaatccatcatcaatttttctggaccaaagattacctaagtctactggctctgctgtggtggtatcgcttgaaggaactaggccacttttagcagaaattcaggctttggttactccgacagcttttggctatgctaaaaggaccacgtcaggtatcagttttaacaaagcttcattgctgctagcggtgcttgaaaagcggggaaacttaatgttgcagaatcaagatgtctatttgactgcaactggtgggattaaattgaatgaaccagcaattgatttagcaattgccatggcagttgcatccagttataccgataaagaaatttcgccgacagattgttttgtaggcgaagtgggcttaactggtgaagttcgccgagttgataaaatcgatgcacgagtaaaagaagcggctaaagtagggtttaagcggatctttattccacggcataatatgtattctggattaaaagatcatggcattgaagtaattcccgtttcgagtattccccaagctttaaaattagtttttggctagcattaattgaattcttactatataacgagtaaactaagattgtttgaatttactattttttgaaagaggcatgaattttggctaaagaaaaaatccgtgtaagatatgcaccaagtccaactggtcacttgcacattggtaacgcacgtactgcactttttaactatttattcgctcgtcataacaagggtacgatggtcttgagaattgaagacaccgaccaaaagcgtaatgttaagggcggttctaagtctcaaatggaaaaccttcactggttaggaattgactgggatgaaggtcctgataagggtggcgactatggtccttatcgtcaatcagaaagaaaagaaatttaccaaaagtatattgatcaattgatcgatgaaggtaaagcatattactcatacaagactgaggaagaacttgaagcacaacgtgaagaacaacgtgctgcaggtgttgcacctcactatacttacgaatatgagggtatgactgctgatgaaattaagcaagctcaagatgaagcaaaggctaagggcttaaagccagttgttcgtatccacattccagaaatggaaacttattcatgggatgatattgttaagggacaccttgagtttgaatcagacactattggtggggatttcgttattcaaaagcgtgacggaatgccaacttacaactttgccgtagttatcgatgaccacttgatgaagatcactcacgtacttcgtggtgatgatcacgtttctaacacacctaagcaattagttgtttatgaggcacttggttgggaacctcctaagtttggtcatatgacattgatcattaattcagaaactggtaaaaaactttctaagcgtgacgaatcagttcttcaatttattgaacaatatcgtgatcttggttacttaccagaagctatgtttaacttcattactcttcttggttggtcaccaaagggtgaaaacgaaatctttaacaagcgtgaattcatcaagcaatttgaccctgcacgtttgtctaagtcacctgctgcttttgaccaaaagaaacttgaatggattaacaaccaatacatcaagaaggctgatcgcgacactttgcttgatttagctttgaacaacttgcaagaagcaggtcttgttgatgagcatccaacaccagaaaagatggaatgggttcgtcaattggttaacatctactcagtacaaatgtcatacactaagcaaattgtagacatggctaagattttctttgaagaagctaaggatctttcagacgaagaaatcgaagaaatcaagaatgatgatggccgtggtgtaattgaagaattcaagaagcaattagacctcatcccaagatttacttcagttcaaatcatgaacgctattcaagcaactcgtaaggctactggcatcaagggaagaaagctctttatgccaattagaattgctaccacgcgttcaatggttggacctggtattggcgaagcaatggagcttttaggtaaagaacgtgtattagaacacattgatttaaccttgaagcaaatgagtgctaataatctttaattagataaattgaaaaagaggctgcaaataaatgcagcttcttttttcatctgctaaaataaaaattagttattttgacagaagggacaagtgttagccgtgagagtttataatacactgacgcgtaaaaaagaagaatttaagccattagttccaggacatatcagcatgtatgtctgtggaccaacggtgtataactatattcacattggtaatgccagaagcgcaattgcttttgacaccattagacgctattttgaatataagggttatgacgttaagtatgtttctaactttactgatgttgatgacaagatgatcaacgaagcgagagctgaaaaaacgactgtacccaaattggctgaaaagtttatcaatgcttttttggctgatacgacagcgctaaacattgagccggcgactttgcatccccgtgcaactcatgaaattaatgacattatcacttttgttaaaagcctaattgacaatggctatgcttatgaagtagacggcgatgtttattatcgtgccaaaaagtttaagcattacggtcagttaagtgatcaaaatattgaacagcttgaagagggtgcttcagagcacattaacgatacagaacaaagccgcaaagaagatccaatcgattttgctttgtggaaggcgcaaaaggaacccgatgaaattggttgggattcaccatggggcaagggacggccaggctggcatattgaatgttctgtcatgagtaccaaatatttaggcgatacgatcgatattcatggtggtggtcaagaccttgaatttccgcaccatgagaatgaaattgcacaaagtgaagctaagaccggtaaaaagtttgttaattattggctgcataacggttttgtaactgtcggtaaagatcaggaaaagatgtctaaatcactgcacaatttcgtaacagtgcacgatattttaagggaagttgatccgcaagtactgcgcttcttcatggctagcgtacaatatcgccgccaaattaactattctgctgaaaatttagcacaagcagctacaattttagatcgctttaagaatactgtgactaatattaattaccgtctagcagatgatacagctagtgaagaatcagccgaattagcacaggcgattatggcaactaacgaaaaatttgaacaggcgatggacgatgactttaatgtccaaaatgctttaacagctatctatgatttgttgcctgtagttaatgccaacgctaatgctgctagagctgacaaacaagaattgcaaaagtttaaagagaaattagctagttggttattagtgtttggcgtggatactaataagctttgcgttaaaaatgctggctccaatgacgatgaaattgacgctttagttaaaaagcgtgatgaggctcgagcaaataaagattgggcaactagtgatcaaattcgtgatcaattaaaggaaatggggatcactattcaggataccccacaaggaactaggtggactcgtgactaaaataaaaaaactagcggaagaggatgttaatccggatactttaaatggacaaactttagcctatttaggggatgcagtgtatgaagtaattattcgcagacacctagttaaaggcggtatcgttaaaccacaagtattgcagcgtgaagcgactcactatgtttcagctaaagcacaagctgcgttggtaactaagatgcaagatgaagaaatgttaacggatgatgaattagctgcttttcgtcgtggacgtaatgctaaaagtcatactaaggctaagaatactagcttgaaaacataccaattatcaacaggctttgaagcaatgattggttatcttgatttactggggaaaaatgatcgagtggcagacttaagcaagtggtgtattgatactgtagaagaggacgggctgaaaaattatgacttcaaataaagattttgtctttggacgccatgccggacttgattatttaaaaacacaaagtgccgacaagattaataaggtttttttgcaacacggtgtacaagaagaatttgctaatcaagtttatagtttagctaaaaaaaagcgtttagttgttcaagacgtgcctaaaaataagcttgatcgtttggttgctggtggcaatcaccaaggtctagttttagcaatttctagctttgaatatgcagatttagatcagttgctggacaagtatgatgcagaaggtaaagaaccatttttattaatgttggattctattgaagaccctcacaatctgggatcaattttgcgttcagccgatgctactggcgttgatgggatcattattcctaagcgtcacgcgactggcttaacttcggtagtagctaaaacatctacaggagcaattgattatgtgccagtagcgcgcgttaataatttagttcaaactactaaagaactgaagaaacgcggttactgggtctttggaactgatatggcaggtactgattatcgtgaatggaatgcccaaggcaagactgtactggtaattggtaacgaaggtaaaggcatcgccccattacttaaaaagcagatggatcaaactattactttgccaatggttggtcacgtacaatccttaaatgctagtgtggcaaccggggtattgctttatcaagcttataatagtagaaatccattagtaaaataaacagaaagtagacaaaagtgtgagttttgtctacttttttagatacataaagctcatttctgtccattaaacatgtgttttcttctcaaactcaggggacagtctgtattctttgaggtggaggataaattgaatgattaatgaagagaagctgattaagaaagtacgggcaggagatgaccaagctttagaaaaattgtttcatttatatgagccgttagtaaattcaatcgtgaagcaattctatttgcatcattatgatcgcaaagattgggatcaagaggcaatgattgtttgttatgaagcagcactagttttctcgcctcaaaagggaaaatttagcagtttatataaaactaaattgtttaatcatgcacggaccttggtacgttacaatatggcacgtcgcaggcaaatctatagtcaatcgattccgctagaaaaggcggacattcaaggaagcgtgaatgaaccatgccgctctgaattatcgattccagttgatgagacttacaataattttgttaatagcttgtcacacgttgaattaattgcattattaaccataattggcgagataagtacagagtatgcgattgatcatctaaatattgaagcaatgaagctggtcagagctcgagcacgaactttacagaaaatgcggaaagtgcttttttgatagctgatcaaaagaaagtgcggtataataagtaatgtagaatattttaggaggtaatttaagatggcagacgaaattattaagactgcattgttagaccgtcacatgaaggaagcttttgactggagtgattcagatatgccagttagagatgccctttgggactactttatggaaaagaatggtagagataccatgaagacggaagaagatatgcttccatttttgaaagactcagacgataaaatcgaagccttcgttaacgaaaatcttaagaagtaaatccgactaaaaaacaatgttctacgcaccgtggtcacgcatagttttgaccactaagacagctaccttctccggtggctgttttttatactaaaattaagaaagaattttaaagatgaaatatataattggcatagacataggaactactgcgactaaaggtgtgttgtatggcgaagatggaagtgaagtagctaaattggcaatttcctatccattgattcaggaagaagcggggcaggctgaagaagatccacagcttatttttgacgcggtacagaaaatgatttatcaattaagtcagaaagcatctggtcaaattttggcaatttcttggtctagtcagatgcacagcttaattggcttaggtgaaaataatgagttactgacaaacagcattacttgggcagataatcgtagtagtgatgtagtgcagcgggcaaaaaagtcgggctgggcaagaatgatttatcagcaaacggggatgccgccacatccgatggcgccagtgtataaattgctgtggcttaaagaagaacagccaacactttttgcacaagtaaaaaaatggattagtatcaaagaatatattatttggggcttaactggaaaaatattaactgatacaactatggctgctggcagtggaatgatgaatttaaaaacgctgacctgggatgaaaagatattggctcagattgggctagatcaagttcaattgccgacaattgctgatcaacaatctactgtgggtaaaattattccagaatatcgtgctaaattgggtttaaatgatgaaactcaaatcgttttgggcgcaagcgatgggtatttgtcaacgattggtgtcggcgttttggatgagaaagattttgcattgaatgttggcacttctggtgcggttagagtaattgcaccgaaggcaattgttgatcaaaagaatcgctttttctgttaccctgttgacgccaaacattatttgcttggcggccctgtaaataatggtggaattgtgttcgattgggccagaaaaacaatttttggcccagatgaaacggcagaggacgtcttaaatgtggcacaaactgctccggctggaagtaatggattgttgtttcatccttatcttggtggtgaacgagctccaatttggaatgctcaagcacgtggatcttttgttggcttgacgcgaaatcacactaaaccgcagatggctagaagtgttttggagggaattgtttttaacttgcttggcgcctctcaaggattgcttgatcaagtgggacagcctcaagctttacgtgttactggtggctttgtgcaaagtgattttgttagacaattaatcgcggacatttttaacttaccagtgattgtaattaaaaatgagcagtgtggtaccctagcagctatgtttttagctaaaactgcattagaagataagccagacctggaaaagattaaaaagcgtactgccgaaagccaagtttattttccaaatccccaaaatgtagcgatttatcaagaattgattctcgtttatcgaaaaattgagcatgaacttgaagcctcttatgaagatttggctcagtttcaagataagcatccacagaaatttgagtaaaacaaaaaagacgcattgcgtctttttttcatagattgattaactattaagcattttcaatatcttcaacaatctgatcaactgtcatacgattgtctttcaaaatttctttcaaaggtacttgatcagtatagacacgtttttggccgtagttgagtactttaatatccttgtcgccaaggtaggaagctactttttcaccaaaaccgccgtccaaaatattgtcttcaatagtaacaataactttgttttcttgagtcaatttgtctaaagcggcagtgtctaaaatattagcagaaactggatttactaagctagcacctgtcttttcagccacctttttacctagcatatcgtacatatcacctaacgctaaaacagcaacatctttacctggtttaatgtcgtacttgatttctgaatagtcaacagcagtaatttctttaccttcaggaacatctttggtaggcatcttaattgctacaggatgcttcttttgcttaatagcccattccatcattgccttttcttcggctaagttagttggagcaaggtagatccagttaggcaagttagaaatcattacttgatcaaacacacctaggtgagtcttacttgtgccagaaatgccaccaccagcaaccatcattacaactggtaaatcattagcggcaacatcgtgtgataattgatcaaatgcacgttgcaagaaggttgaattttcaaataaaactggagttgcaccttccttagccattccggcagcgaaggcaacggattcttgttcagcaattcctacatcatggtagttttcaggatatttgtttttaattctgtctaagccgaaaacgccgggaattgcggcattgatagccatgatcttctcaccattattgatgtgatcttcaagaacatcgagtgcaatagagctagcggtcggaccttcaggcattgctactgtcgtcttgtcagtctttaaatcgaatggcattacccagtggtgtgcttcttcgttgtcgattgcaggttgataacctttgcccttgagagtgttgatatgaagcaaaatagggtgatcaacatttttaactgctttaaaagcatcgatcattgattggatatcattaccatctgcgacataacggtaatcaaagcctattgcagtaaatggattttctttggtttcaccattagaatcacgtagtttctttaaagcagtaactaagccaccgacgttatcatcaattgacatttgattgtcgtttaccactacaactaagttatgcttttcaattgcagcgttgtttagcccttcataagcaaggccaccggtcattgaaccatcaccaattaaggccatgatgttttcatgtttgcccattaaatcgcgtgctttagccatcccagttgctaaggcaattgaggtagatgtgtgaccgacggcgtaatagtcatatgggctttcatcagggttgctatatggagttacatcttcatagtggtctggatcaagccaagcgagtgcacgtccagttaacattttgtgcgggtaagtttggtgggaaacatcccagacaatcttgtcctttggtgcatcaaaaacatagtgataagcaattgtagcttcaacgattcctaagtcgggacctaggtgaccaccttcagcggcatctttttctaagattagagtcctaatttcactggctaacttttccatttctggaagagataatttttttaaatcagcaggaccagaaattttattcaatagatattcaggatgtttatttattattatgtcctttctaacaagtagttacacttattatagataagcaaaaatcaaaataaaaatatttagttgtaattgagctcgattacttttagtaatgtaaatcagattattgacgtaggaagggacaacagtataaaatactgagtaagtatgtgtttttataaaagtttggaagtgagattatggcagtgaaaaaagcagccttagcctgcagtgtttgtgggtcacgcaactactcaatcaccgcaagtaagaatcgcactcagcgacttgaacttcaaaagttttgcaaacattgcggtaagaaaacattgcataaggaaacgaggtaaataaagctaatgattaagttttttaagagtgttggtcatgaaatgaaattggttaaatggccatccgcaaagcaaaatagacgtgatacagcaactgttattactagttcaattttatttgcggcatatttaggtgcacttgactggctcttcacttggttgactcaaagattaatgtaattgctagcataattagaaattatcagcgattcatgctataatattgacagctaaaagaaaacctctgtgggaggtttttttgtttacctaaaatttaaggagaaaaatatggtcgaaacagcacaaaagaaatggtacgttttgcatacttattcaggctatgaagacaaggttaagtcagacttgttgtcacgtgcgcaaagcatggggatgcaagactacattttccgtgtaatggttccagaagaagaaaaagtagaaaccgttcgcggcaagaaacaagaaattgaagaaaagattttcccaggatatgttttagttgaaatggtaatgactgatgaaagttggttcatcgttagaaacacacctaatgtaactgggttcgttggctcacacggtggtggctctaagccatcaccacttcttgatgaagaagtaacgcgtttgcttaagaatcaaggtcaacctgctaagaaaccagtagttaactttgatattggcgaatcagtaactattactgaaggtgcatttaatggcatggtaggtaagattactgatattcaaccagataagtacaaattatacgtatcagttggcatgtttggtcgtgcgactactgctgaacttgattatgatcaagttaagaagcttgacgaaaacgaataatatttagaatttttagttgtaattgtacccaaacgatgttattctaatacggtacgtttattattgtgggaggagaaaaaaggaaaattctccattttaaccgcatcacggaatcaaggaggttttgaccgtggcaaagaaagttattaacgtagttaagttacaaatcccagctggcgctgctaccccagcacctccagttggtcctgcattgggtcaagctggtattaacattgttggttttactaaggacttcaatgctagaaccgctgaccaaaagggcatgattatccctgtagttattactgtatatgaagatcgttcattcgaattcattactaagactccaccagcaccaattcttttaaagcaagctgctaagatccaaaaggcttctggtgaacctaataccaagaaggttggtaaggtaaccaaggaccaagttaaggaaattgccgagactaagatgaaagaccttaacgctgctgatattgaagctgctatgcgcatggttgaaggtaccgctagaagtatgggtatcgaagtcgaagactaatcctgttatttaggtaacaaattaggtgggagagttaagagaagctcgtttgaccacatatacaaggaggaaatcacatgccaaagcatggtaagaaatatttagatgctgccaagaaggtagactcaaataaattatactcagtagcagaagctatgaaacttgttaaggaaacttcatacgcaaactttgatgctactgttgatgtagcttacaacttaagcgtagatcctaagcaagctgaccaacaaattcgtggttctatcgttttaccaaatggtaccggtaagacccaaaccgttgtagtatttgctgaaggcccacaagctgatcaagctaaggctgcaggtgctgactttgttggctcagatgacttggtagaaaagatccaaggcggctggttagactttgacgttgtagtagctactccaatgatgatggctaaggtaggtcgtttaggtcgtattcttggacctaagggcttaatgcctaaccctaagactggtactgttaccatggatatcgaaaaggctgttaagaatgttaaggctggtcaagttgaataccgtgttgaccgccaagcagctattcacactcctattggtaaggtatcattcactgaagaccaattagttgaaaactttgacgcattacgcgacgttatcttacgtgctcgtccagcttcagctaagggtcaatacattaagagtgttgctgtttcagcaacctttggcccagggatcaagcttgatccattaaacttggactaatttaaaatagactattaaaagcctcgctattgcgaggcttttttctattcattgacctattattttcgaacatggtatcataaattgaacttacaaatctatatattaaggataatgtcatgaaaaagcattctattggaaaactagtcattatgttggtgctaatgctagcttttgttgcgggctgtgctaataatggttctaaaatcactattgttggttcaagtgcaatgcagcttttagcagaacaagcaggtaatgattatcgcttaagtcatcaagacagcaacattgtcgtgcagggtggaggatcaggtacaggattgagccaggttcaagctggtgcagtccagattggaacctctgatgtttttgccgaaacacaaaagggaattgatgccaagaaacttcgtgattataaaattgcagtagttggtattgttccaattgttaataagggtgtaggtgtgaaaaatgtttcgcaaaagcaattgaaacagatcttcactggtaaattaacgaattggaagcaactaggtggcaaaaatgaagccataactgtgatcaatcgttctaagggaagtggtactagatctgctttcgaagatataattttacaaggaacaaaaccagttaagtcgcaagaacaggactctaacggtgccgttaaaaagattgttaattcaacgcctggtacgattagttacttgtcctttccttatgctcatgataccaatattcaaaagttgagtattaatggggtaaagccaactaacaaaaatattactactaataagtggaatatttggtgttatgagcacatgtacactaagggtaagcccaacaaacaaactaaagcgtttattaattatatgttaggtgaaaaagtacaaaaagatcttgtacctaagattgggtacctcagtatcaatgaaatgaaagtaactcgtaatagcaagaatcaagttacacaaataggaaaatagttcatggataagaaggataaattaaaggaagttgttgatcaagcaattgctagtcaacacgttccacacgttaaattaaaaaagatgggtccgactagtgttgatattgataaattaaccaagccatctaaagagactcatcaagaatattggggcaagggtttaacttacttggcaattgttttgattattgtcttagttgtctcaattatcggctttgtcggctatcacggcttggctacttttgtcagcgatcatgttaatgtcattcactttttgacttcaactgattgggacccgggtgagggcaagaatcatgttggtgctgcggtaatgatcgttacttcgttcttagtaactcttttagcagcattggtagccaccccgttggcaattgcaatagctctttatatgactgaatattcatctaaaaagggtgccaatttcttacagtcagtgactgaattattagttggaattccgtctgtagtttatggtttcttgggattaactatcatcgtgcctgtgattagaaaactatttggtggaacaggttttggtattttagcagctacgttggcgttgttcgttatggttttaccaacaatcacatcattaacggttgatagcttaaaggctgtaccaagtcattttagaaaagcttcaatggccttaggttctacgcattggcagactatttatcatgttgttttgcgagttgctacgcctagaattttgacggcggtaatcttcggaatggcaagggccttcggtgaagctttagccgtacaaatggttatcggtaatgccgtcttgatgccatacaatttggtcagtccatcagcaacattaactagccaattaactagtcaaatgggaaatacggtcatgggaactttgccaaacaatgcattatggtcattagcattattgcttttaattatgtctttggtatttaatttcctagttaagttaattggaaagaagggacaaaagtaatatggatgcaaaaaagaaagataaattagctacggcgattatctatattttggtaggaattgttgtattaattttggccggtatcctaggtgatatcttgattacaggtattccacatttgtcctggcgctttttgagttctgaagcctcatcataccaagctggtggtggggtacgtgatcaacttttcaattcaatttatttgttaattttgactactattatctccttaccaattgctttaggagcagcaatttatctagcagaatatgctaaagataattgggtgaccaatttgattagaactacaattcaaattcttagttcattaccatcaattgtagttggcttatttggttatttattgtttgtagttcaatttggctttggtttttcaattatttctggtgctttagctttgaccttttttaatttgccaattttaactagcaatattgaagaagcaatcaagggcgtcccacaagatcaacgtgaagcaggattggctttaggattatctaattggaaaactattcgcgggattgttttacccgctgctcttcccggaattttaactggaattattttgagtgcgggccgaatcttcggggaagctgccgctttgatctatacagcgggacaaagtggatcaacagtcaattatgcggactggaatccatttagtccaactagtccacttaatgtaatgcggccagccgaaacattggcggtccacatttggaaagtaaatactgaaggaattattcctgatgccacgattgtttcagcagctacttcagcgctcttggttattgtggtaatcgtatttaatttaggtgcacgttatttaggcaataaattgtaccgcaagttaactgcagctaagtaggtgaaataatgcaagatttaaaacctagctatattaaaacttttgcaaatgatgatttggaattatcaactgaagatttaagtgttctttatggcggtaaggtacaaaaattatttgatgccagtcttcaatttaaaaagaacacgattacagctttgatcggtgcttcgggttcaggtaaatcaacatttttacgttcattaaatcgaatgaatgatcgagtagcaactgttaacggaaaaatctggtttcatggtttagatgtgaataagcctaatatcaatgtttatgaattaagaaaaaacattggcatggtttttcagcggcctaatccatttcctaaatcaattagagaaaatattgtttatgctttgaaggcagatggacataaggatcgggcagaacttgatcgagttgtagaagaaagtttgcgtgcggctgctttatgggatgaagttaaagataagctggataaaagtgcattagcattgtcgggtggtcaacaacagcgtttatgcattgctcgtgctttagctgttaagccagaaattttactactggacgaacctgccagcgctttggatcctgtttctacttctaaactggaagatacccttaagcagttgaggagtaagtatactatgattatggtaactcacaacatgcagcaagcctcaagaattagtgattatactgcattcttccatttaggacatgcaattgaatataattcaacggcagagatctttactaatcctaagggtaagattactgaaaactatattcagggaagttttggataaaatgacaacaataatttcagcaaaagatgtacatctaagttatggcaattatgaagcactgcacgggatcagtcttgattttaagaaaaaagaattaacagctttgatcggtccaagtggttgtggtaaatctacttttttacgctgtcttaatcgaatgaacgatgacatcgaaaacattaatatcacaggtgaaatcaagtttgaaggccaagatatctataattctaaaatggatttggtcagtctacgtaaagaagtcggcatggtttttcaacagccaaccccattcccgttttccgtatatgacaatgtggcttatggcttaaaaattgctggtgttaaagacaaagagctaattgatcagcgggtagaagagagtcttaagcaagctgctatttggaaagaaacaaaggacaatttaactagaaacgctcaagcattttcaggaggacagcagcaaagaatttgtattgctcgtgcgttggctgttagacctaaagttgttttattagatgagcccacaagtgcgcttgacccaatttcaagtagtgagattgaagagacactgatggaactaaagcatcagtatacttttattatggtgactcacaatttgcagcaagcaggacgaatttctgatcagaccgcctttttgatgaatggcgatttgattgaagctggtccaactgaagaaatgtttattgcacctaagaaacaaatcacaagtgattatcttaacggtcgttttggttaaaattttgaggtaaaaagatgcacgaaatatttttggatgaactgaaaaaattaaatacacaatttatggaaatgggtgtcctcgtcaacgatgatattgaccatgctacccgtgcttttgttgatcatgataaacattctaagctaaatagtgaattagttatccgacgggataattgattcactatttttattcttttgtagaattaaagtagtggtaaaacgatatgccctgaggtctttagacacttgatgtcgcataataaactggcagttttacttaagttttcaatagtctcttcgaagaatgtggacactagatgtcgagtttagaaaattagatctgatttcttaagtaaatacgttttactactaagttttggaggtttttattatgcaagttacttttggaattgatgtaagcaagtctacttctactgtttgtgaactaattggtgaaagcaaaaatgaactaaccattactaataatcgtcctggttttattcaattgcttcatgaattaaccgctttttctaaacatccgcaaattatttttgaagctaccggtgtttattcacgcagactgcaggcttttcttgaagactacggctatgaatatgttgttattaatccgcttaaagccaaaaaagagatgaatatggggctacgctacaacaagaccgataaaactgatgcttatcatttagctttaattcaaagactttatcgccatccggttaatcaaagcgaatcccaaacttataagcagcttaatgctttgagccgcttctatgaccagctgacaagtgacttggtaatagctaaaaatcgacttcaccaagctctacaatcgacttttcctgaaattgaaaatttattttcttctgctagaggtaaaaattactggcaaatagttgtgcgatatcctcattgtgacttagtaagaagagaagataaaaaacagcttattaactggttaatgagcttaaaggggattgcttttaaacacgctctaaggactgcagataaattaattgaattagcttatcaagcttatccagttgtatcttgctctagcatagaagtcgagcaagtgcagtattatgcacacagattgcttaatttaagtgatcaaagagaaaatttaatcgcaagaatggttaagttagcgaagtctttgcctaatcatgatttagaaaacctagaaagcattccaggctttgcacagaccactgctgtcagagttttagcagagttaggagatttacgcagatttagtaatcctaataaaatcaatgcttttatcggaattgatccaggcagatatcagtcaggagaaatggactctaatttaagtattactaaacatggcaatgcagtcgcacgtaagttgctttatcgagctattggacaaattgataatgcagctaagacaaatccgtgtcatatagcagattattatgaaagcaaaaagctatcctctcaaaccaaagggttcaaaaagatagctattgcttcaattcataaactaatcagaaccatttatgccctgattatcaatgatcaaccatatgattacaacgtagccacacataatcaaaaagactttagtcgtaattaattgatcaagtacattataacgctaagcccaaaaatcagatatggatctgggcttatttgtcgtgtctaactaaaaaaataaatcgacactaaaagatgtttaagttgaaatttaaacaaaaaatgaagccaaacttcttattatgcttgactttacgtagaaaaagactgcgcagtcaatggttgatgatgaagaaaagattcctacagaatcaattaatattcaaaagcaagccttaaaattaatggccttgcagcaaccggtagctactgattttagagttgttatcagtattttaaaggccactactgacttggagcgaattggtgaaaatgctatgagtattgctctggaaacaatcagagtaaaaggtaatcctcgtattccagaagttgaagaaattatttctaatatgacacataatgtgcgacatatgttaattcaagttttaactgcttacgtgcaagatgatgaaaaaatggcacgtgaagtggctagtcgtgatagcatgattgaccacgactatgtaagagctcgtcaattgatcgttgatggaattgaagatgatccttcgcgtgcaatggcttcatcaagctattttgtagttacccgtttacttgaacgaatcggtgaccacattgttaacttggctagctgggtggtttataaaactacgggtgaactagaagaactatctaattcaactgaaagtgaaacgatttaaataaagtaccgtaaaaagcggtgctttttttgtaataaaaaacagttgatacgcgtggtgctagttaaatcgttctagacaatatgccatattataagctaaaatagctatttctagccgctgttgaaagcctactggacttcttgctcgattattctcagcgttgtaataactaagcaaagaaaagtcgctttcaatgctttttctaattgccatcatcgcttactattgcgtggaccttgaagccataataatagactttcttggttgctttataaccaatatcagctacgccccgaaagatcttgacacgataattgcaaacaggctggcaaactggcactgggaaactatcaataatcaaaaattctccagctgtctttacttcttgattccaagcctgacggatacaacgaattagaggcaagagcattcgagctcgacggttaaaacgagaatgagataagccaacgaagaatttacagaatcttcgttgagattcaattccaatttcagtttgccaaatgagcatcgctaagatagaactatcaggaagcttggtctgatcaacatttttacgatgtttaagtccatcaggcgcataaagcttatatagcgagcgacaaatcacatttaaccgattaaaactaacttgtaaatggtgagaaaaacgcttaagcttgagatagttcaattagatcagactcttttctatttaaattacctacaacttttattaactaaaacgatttaactagcaccacgcgtataattaatgaatatttcaaaaactgtattggcgttatatcaaacaattattggtgaaaaacagaaacgcttaatcaagacagtagatgcttatttggacattaactacggtgataaagtttatcagataattgatcaagttaaggaacgtaatattccaattttgtcttttggggatatagcagatcaaaacaatacttactcaaactacactgtttttggcaatgatcaagttgacgagatggtggataaaattaatgaaatcatcaataaccaaaataaataaaattatcttttgcattttacagcaaagcttgctataataattaactgtaaattctacctaagactcgggtggcatgacgcctcaaaatcccgccgaggccagaagatgatgaagatttttatgctccatgtctttcggcatggagtttttgcttttttaaggccttatagaatttatcaatgtgatcatggaggtgaaataatttgagtaaagctgctattgctgaaaaagaaaagttcgttgatgcatttgctgaagaacttaaagctgctaaggcaatcttggtaattaactaccttggtttgactgttgaagaagttactaacatgcgtaaggaacttcgtgataacgatgttaagatgaaggttatcaagaacacctacttaagacgtgctgctgctaaggctggtatcgaaggtcttgatgatacttttgttggaccaactgctgttatctacactgataacgctgatgacgttactgaacctgcacgtatcgtttctaagtacgaagatgactttgacgttatcgaaattaagggtggtatgcttgaaggtaagttgacttctaaggatgaaatcaaggaacttgctgctatcccaggccgcgaaggtttgctttcaatgcttgtttctgtattacaagctcctgtacgcgactttgcatatgctgttaaggctgttgctgaatctaaggatgaagactcagctgaataataaagaaatttatatttaatatctaaattctaatttttcggaggatacttaaatggctttagatactgataagattattgaagaattgaagggtgctaccatccttgaattgaacgaccttgtaaaggctattgaagacgaatttgacgttactgctgctgctccagttgctgctgcaggtgctgcagacgcaggtgctgctaagtcagaattcgacgttgaattgactgaagcaggtcaagaaaaggttaaggttattaaggcagttcgtgacattactggtcttggccttaaggactcaaaggaccttgttgatggtgctcctaagaacgttaaggaaggcgtttcagaagacgaagctaacgacatcaaggctaagcttgaagaagttggtgctactgtaacccttaaatagttacagcccaactgggcaactatgaataagctctttgctatgtgcgaagagcttatttttttgtataattaaatttatgatgaaagatatagaaagaagactaacgccatatcaatgggtaatggccattttagctattatttcgatttttttgattattttagattttgctgcggttattaatattgatgaaccgactagtaaatggttctggatcaatagtgcaattgtagtatattttgcaattgattattttcgtggcttacatgcagcagaagacaagaaactatatttcaaaactcacatttatgacttgctgagtattattccaatggggttattgtttatcagcttaaatatttttaatttatctgggctggtatcagatttgcggcatttgcgtttgattcgattagctggtttgatgggaaaattacgtaatatttttcatactaatggcctactctatgtaatcttttttacaattacatttttgttggtaggagcggaagcattcgcaatcactgaacatgtaacgctggatactgctttttggtgggtcatttcaacagcttctactgtcggttatgatgcaatttttggcaaaacaattccaccgcatagtattgtaggaaaattcgttacattagtaatgatgcttttaggaattggaatagttggtatgttaacgtcatcgattacttcgtatttgatgaggagaacgaatggcgcgaatacgttaaaaacgcatgataatattcaattaattttgaaaaagcttgataatttagaaaagcaaaacaaggatttggctgatcaaaacaaaaagatgcaagcacagattaatgaattgaaagatgtacagaatacaacggagctgcataagataaaagaatggtttgagaaaaagaaaggttagttaaaatgagtgaagaaaaaaatcaaatgtattttgcgactgatcctactgccaagcatgatcaacatgttgttgattatcatgtggataatattgatttgaaattcacaacagacgcaggtgtcttttctaaaatgagggttgattatggctcaggcgtattgatcaaggcaatgaaagatgttgtttttcctaaggataatatcttggatgttggtaccggttatggtccgattggtttatttgcggctaagttttggcctgatcaaactgtagatatggttgatgtaaatgagcgtggattaagcttggcaaagcagaatgcacaagttaatcacatagataatgtaaatatctattcctctgattgttatgaacatgtggataatgataaaaagtttggtctaatattaacaaatccgcctattagagcaggaaaaaaagtggttaatgagattttactgggagcaaatgagcatttggttaatggcggtatcttattagtagttattcagaaaaagcagggagaacctagtgcgcgtaagctgatgaccaatacatatggtaattgtgaaattttaacaagagataaaggctattatatcttaaaatcaactaagaaataactaaataaaaaatgcttgaaagtactattaaataagcattagactttataaaagtgctttcaaaactggatttatcctcgtataataatcttgtaaatatcaagagtatgtgaagaggataattattatgaaaaaggcttggaaatacattgttgcagtattgattgtaattgttggtgtgtttatgttaggtatgatttccggtgataacgagactgctgctccagctggaattgctgcattatacttgatcttgtcaggaatctttttctaccacaactttagaaatcgtaacattgaaccattgtaaaaagtaagcagctagtcgcaaatcaatgtcattaagttaagacattgacattatatcgacagcttttaaagatcgaatcattttgattcggtcttttttctttttaaaataaaaagtgagcagagtttatttgcctttctgctcactttcgtcatattatctggtctttcatagaaagctgtgcctcttatgaaatcccttcactcaaatattttaaagctgatggatagtattatcaataaaatcgctgacaacattcacgatttctctgtatctgatcaagcttttactcgctgtcgtaagctcaattccactgatttgattaagttaattcttaacatgggagctggcagcctgaattcggaaatttttcatgcttttcctgacataaattctagaatgactgcttcggcttttgaacaacaaaaggctaaattaaagcctgaatgctttaaagaaattatgttagaacttagccgggcaaataatgtactgcaattattagataatcaatacttagttgttgcgattgatggctctgattttgatcaaccttttaatcccgaatcagaaaatatttttcgaggtaaagatggtcgaatatactgtcaacttcatgtaaatgctctttatgatgtcttgaataaattatatttacttaaacttcccacactaaataagccagtaatctcttgatcttgcttggctttaggcttctatattatttttgctagttttctttaacaatttttgcatgtatttgggtaaacgattgataaagtcagccgtgaattcagctatttgtgcttcactggcatgaaagacttgctttacgctggccagcattgcatcagtaatcaattgcaaggaatggctaaaagtaatgtccgccagctcatcaatcatgcaatagaacagctcgcctagcgtgcgttcatcttcatcgtcccgcttggcaactgacataagcatgtagcgagtaaaaactatggcaacatgagcggtcaaagcatcgtaagacaggccatgatattccgtacttagttttagataacttttgcaagttttgaaaaaaacctcaatatcccaacgcttgccgtagttgcggataatttcatcttcgctaagcgacatgtcggtacaaatgattgccagccaatccttgcgattggcacggtttctaacgcagacaatccgtgcatctattttagcaccgtctttgtcctggcgtccgactttgactgggattgacagcaggtagcgagaacggccgcatcgctttttacagctgcgataaatctgtttgatgtttttgcgttctccctcaaattcatatttgattttggagctaaccttaaccatggcaatcacatccagcttcctttgcttgagctggacgatttgatgtggatttgagaaccagctgtcaaacagcacgtacttggcttgatgacctgctttcatagcttggtcgattaaattaaccatcacgtctgtgcctttagtccgggcaagcatacgtctttggccagcaatggtgcactgatcaaaaactttattttcgccaatcatattctgtagcttctgagaagacagcagcactgaattgattggcatgaaagaagctccatcagtccagcccagggtcatcatgcgaaaacctttcttgtaagtcattgatacatggtcaaaaactttggcgactaattctgttttcttgaagccggtcctagagaagtaggaatcatcgacaacaaagcaatcagcccgtttttctgaagtcaaagatcgcaagtggttattaatgatttgcgcagacagaagtgtggtgaagtggagccaattgacgtgaacgttgcgcataaaacggtaatatgagttcttggaaaaattttcttgaaaatgatccattttcagctgcatatataagctgcggtcacgaaagacattgcttaaaacgtaaagaaacaagctgaacaggctaatgcctttttccttgcggaagccacattttctcaacagcttgatcacctgaaacttcttgatgaagctgatgattgagtttgaaaatagttgttcattttgttggtcaggagatggtaaaatagacattggcacaagcctttcatgcaaataaattatgttttggtcaatataattatagcaatgaaaaggacttgtgccttttatatttgtcaaaacacgcagaatcacaatgaaacaagcaattttgcgtgtgggaagtttaagtatttagacatggttatccaacccagacaaaaaatggatgaacgtgaggcagccttaactatgttaaagaaattagcccaacaagaaaaagatttcttagtcctgatggatcgtggctatattagctttaatttaattgaaaattgcaatcgattaaaacattgccactatgttatgcgatcaaaatccggagatggtgcttttaaagaaattgtagctatgtcgaatcatgaatacgatattgacttatcatgcagagtaacttcgtcacattattattatgtcacccataaagatacagaaaagtttcttcacctgattcttcacaaaaagcatcactataaagctgttcgttcaaaaaataccagagatcaacgctgggattttgaggatatgtgtgatgttagatttagagtttgtaagtttagaatcaatccaccaggttcagacgatgagtgggaagtcctcatcaccaatttagatcgaaatgaatatcctctagctagaatgaaagagatctatcatcttcgctggggaatagaaacttcttttagggagcttaaatatgacttaagcggcatacagtttcattctaaaaaagatcaatttgtttatatggaaatatacgcccattttgcaatgtataatgccgtgagtttatcaataattgcgagctcaaaaccgtatactcagggaaaatatcaatatcaaatagattttaaaatggcctgttgtatctggcgacgatattttagtataagtgataattcagataaaaacttcacacaattactgctggatgtggcattttatttaacgcctattcgaccaggaagaaaagataaacgaaatctaaaagttaaattagtagttggctttccttatcgtctagcagcttgaactaatttaaacgactatcttaagatggcttatttgtgctatcaaaaaagacatttatcgaataaaataattcgataaatgtctcaaaaagtgtcatcagattagtcaatgtcttaacttaatgacattggtcgcaaatagctgcttttttgatacaataaataaaaacgatgaattgagaagtgataaaatgctgtctagcgaagataaaaggaaatacatgcaattagccattgaccaggcaaaagaagctgaaaagcaaggagaggtgccgataggggcagttgttgttgatcctgatggccgcgtagttggtactggatataacaggcgtgaacttgatgaagatgctacccaacatgcagaaatgattgcgattaaagaagcttgcagtaagttaggcatgtggcgcttaattgactgcagcttattcgtgactttggaaccatgcccgatgtgtgcaggggcaattattaattctagaataaaagacgtttatttcggtgcacttgatccaaaagccggagcttgtggatcagttgtggatttatttagcgtagaaaaatttaatcatcatccgcatgcaattcgtggactgtatcgtgatcaatgtgcacaaatgctaaaagattttttcagagcgattcgtgagaaacaaaaagcagctaaattagctcaaaaagaagtataaaatcagtaatttttaaaacaagatgctggtaatatttactgaaatacgttaacatagttgttgggcaatgtttgacctctgaattgtgtcaggaccggaaggtagcagcactaaggttgttcaggcatgtgccttttttgttagaatattaacagctcttagctcttcgagagctaggagcttttttacttaggaaagagaatttatggcttatcaagcgctatatcgtaagtggcggccgcggacttttgacagtgtgattggtcaagaagcgattaccgataccttaaaaaatgcgattaaacgtggtaaggtttcccatgcgtttcttttcgcaggaccccgcggaactggtaaaacatcttgtgctaagatttttgctaaggcattgaattgtactaatttgcaagatggcgaaccatgcaatgagtgtgctaactgtattgcagctgatcaaggttcaatgccagatatcatggaaattgatgccgcttcaaataatggggttgatgaaattcgtgaaattcgcgataaggtaaaatatgctccaacggaaggtaaatacaaggtatatatcatcgacgaagttcatatgttgtcgatgggagcttttaatgctttgctgaagacattagaagagccaccagagcatgtagtatttattttagcaacgactgaattgcaaaaagtgcctgcgacaattatttctagaacgcagcgctataattttaagcgaatttccaaagaagaccttgagaagagaatgaaatacattcttgatcaagaaaatattaaatatgaagataaagctttagcagtcattgctcaagtagccgatggtgggatgcgggatgctcttagcattttggatcaactgttgagttacgagaaggaaagcgtcaactatgatgatgctttgcagattacaggctttgcagatcgagaaaatattgaaaaaattcttttagctttgttaaatcaggatgcaggtcaagccttgcagtttacacaagatgagttggctaaaggagctagttcaaaaaacattttagatgaaatcatcgatctaactactaagagtttattaatcgtcaaaaccgatgaaaataaacaggaaacttttttaacaaaagactttattgaaaaaataaagagcgtttctacagatagttattatcgattgattaatttggctaataatgccttgaatgatttacgctatactaatcagcaacagataccactggaagtgttcttagtagaagcaagtagtactgcaccagtgcagacaagcgctgccccagctaagacaacaccagctcaacctgcacaaggtaatactgatttgcaggctgaactagcagcgctgaagaagcaagtcgttgatttaacacaaaaacttagtgaagtatccaataagccaagtttatcaacaaatcaggtatttcacttggatactgcggtacctaaagtggctcctaagcctgctgttaaaccaaaagagaagcaaactaaaaagccggttagaaaagtcaaaaaaactacggcagaaaatcgcaaacaagtatatcatgttcttgaaaatgctactcgaaacgatttagagacaattaagaatgtctggcctgatttacaatctgttttagctgtctctgaaaaagcactgcttgatgtattagaaccagtggctgctagtcctgaacaagttgtcatgaaatgcaaatatactttatggtttgaaaatgcgagcgcagataatgatctgttagggcgcttaacggactatattgaaaagtttgctaaacattcttacggcattgttttggtgccagataacgattggctggcagttagaaaagaatttgttgaaagccataaggatgagctacttgctaagaaaaagcaacagattgagattcaagaagaaaagtcagatgaaccagaagttgatccagaagtgattaataaggcaaaggatctttttggggatgcagtcaatattaaagactaaagtactatgagcaatgattataatattaaagttttaaataaagaaacaacattacagatcttactagaagatcataattctttgattcgttttggagatggagaattagatttaattagaggagcaagtattccgtatcaagattatcaaccggaattagctggttcgctaaaagagctcctgttagaaggcagcaatcgccgtttattagtaggattatctgatgtttttgaaaagttagatcgctataatgattattgccgtaatttttatcaaaatagtttcttcccgaataatcatgacttgttaagagaagttgaattgcaatacaatgtatacgtttctactttcttttcacggccatatattgatttagtagataaaagtcacgctaaagattattttgctaaaatgaaacagctttggcaggatcatgatcttttaattgtagaaggtaaatatagtcgctcaggcgaaggcatgacttgttttctaatgctagatcaattagtagactcatttgtccgccaactaatgcatatagtcgcaaaaaagttattgaagatgaaattattaaaaatgcagctaataggttgattttactgatgttaggtcctactgcaaaagtgattgtggctgatttgatagctcagcttaataatcaaatgattgatatagggcacatcgattcagaatatgaatggatgaaaatgggcgtaactaataaggtgaagataccgcataagcatactgctgagtttaattttgatgataaacaagttaaactagagaaagacgacaattttgataagcagattattagtataatagaataataaaggagaaaaattatgagtagaagacctaattttggtggtatgggcatgggcggcatgaacatgcaacaaatgatgaagcaagctaagaagttgcaagcacaaatggcagaagagcaggaaaacattactgctcaagaatttactggtaagtctgccgatgatttagtagtagctacctttactggtgaccgcaagttgaaggacatcaagattgataaggaagcaattgatccagacgacccagatatgttacaagatttggtaattgatgcggttaacaagggcttggccaaaattgatgaggcaactcaggcaagcttaggtaaatacacgaaaggtttgatgtaattgcaatatccattaccaattgctcatttaattgatgcttatatgaagctacctggaatcggtgaaaaaacggcgactcggttggctttttatacgatggatatgcctgatcaggatgtcgatgattttgctaagtctttagttcaagtaaaaaaagacattcatcaatgtccgatctgtggcaatattaccgaaaaagatgtctgtgatatttgctctaatcctaatcgcgatcaaacaactattatggtagttgaacaaccaaaggatttgatggcttttgaggaaatgggcgaatatgacggactttatcacgtgcttcatggtgttctttcaccaatggatggaattggaccagaagagatcaatatcaagtctttaattacgcgtttgcaaaaaaatgatgctgttaaagaagtgattttggcgcttaattcaactccagaaggcgaatcaactgcgatgtatatcagcaaattaattaagtcagctggtattaaggtaaccagattggccgctggtttgtcagttggtagtgacattgaatatgctaattccattactttaaagcgcgcagtgcaaggaagaacggcattataatggctaataaaaagcaagcaaagatcaaagcaatgggtgatcaaaagttggtagccgagattgaaaagctacaaaatcaaattgcattagagcaagatctcgatcaaacaactttagatttatccgaagataattatgtgcaaaatcgaatcttaaaggcaaagtatacttttttgtataatgaagctcgtcatcgaggcacaagatttagtggtattactaatgctattacccagtagaaaaagaccgaatattggtctttttttattttgaataaataaaaaatagtaggactgttaatctctatgaaacttatgtagaatagacatatggaggattttatgagaggttattttgttagttttgaaggccctgatggcgccgggaaaagtacagttttaaaagaagtattgaaccaaattggttcagagcttgagacacaatatcttgtgacgcgtgaaccaggcggttcaaaaattgcagaaaaaattcgcgacattattttagatcctgctaacgacaagatggacaataagaccgaagcgcttttatatgctgcatcacgtagtcagcatgtggaagagattattcgtccagctttaaaggaaggcaaagtcgtattttcagatcgctatgtcgatagttctttagcttatcaaggagcgggacgtgatttaggaattcaggaagttaagcaaattaatgattttgcaacggataaattagatcctgatcttacttttttcttagatcttgctcctgaagtagggttgaaacgaattgaaaagctgcgtccgggtcaggaagatcgtttggaacaagagaatcttgcctttcataaaaaggtttatgccggttttctcaaggtaaaagaaatgtatcctgaacgtttcgtaactgttgatgctacgcagccaattgatcaggtagttgctcaagttattgcaatattaaagcaaagaatgccagagttattttaaggattgatttagatgaagttagtaattgcaattgtgcaaaaagaagactctaatgatttacaacgggcctttgttcaaaatgattttcgtgctactaagttagcaacttcaggtggttttttaagtcaagggaataccacctttttagtaggttgtgatgacgacaaggtagacgatgtattaaagattattaaggaacagtcccgagcaagagaagaaattgcaacaccacatatggtttcaactgggtatgaaattacacagcctttgaaagtgacagtcggtggtgcaacttatttttttgttccagttgatgagtttaaacgcttctgatgattgatcttagtaatgttgggaaaaagcaaacccaatttttaaaaatagcatatgaccaaaaaaagttagctcatagttatctttttgttgatagcgatgaggcacgggcattgaatactgcatactggctagcttgtttgtttaattgtactggtgaaaataagccggatggcagctgtcaaaattgtcggcaaattttgtcaggtaaccacccagatgtattgctagtagcgcctgatggaaaacagactctagggattgatcaaattcgtcccttaaaagaagaattagccaaaagcccagttgaaagtactcgccgtttcttctttattaatgaagcacaaaagttaactttagctgcagcaaacggtttattaaacttactagaagaaccagtagcgccagtagttacgattttgattactaataatagcgatcaaattttaccgacggtgcgttcacggacccagatcattaattttgacaatggtgagagggctagtggtaggactgcagtcttactggagaatggtttttcaaaagcagagattgaggaactgggtaatcttgataaatggaatcaggcaattaaatatttttatcaagaaatgctggaacacaacagcttagcacttgtcagtgcacacaagctagctgctgatgctaagctagtgtcagagcagcgttacatcttgcttcagttaaaattattggccgagcaagatttgcgtaatcctgctaaaagaataatggcggcgacaatgcttaagaatttaattgaaatagacaaaatgcgcttgagtaacgtaaatttacaaaatgcgttagattatctcgccttaaaatggaagtaggtgtttagattggatccatattcaaaactgaaaaagattgaagaaacaacagaaaatatgaccaagacgattgccagcttggaaaatgatattttagaaacattaaaagaaaacacggagttgaaggtagaaaaccaattactccatgagaagctggacaagttaacggcaaatcagcctgcacctgagactaaaacgcagagtggcttggaatcattaaagaagatttatgattcagggtaccacatttgcaatatgtactatggctcgcatcgtgatccaagtgcagattgtatgttttgtcttgatattttggacaattttggcgaaaaaaagggcaagaaaaaggacggtagataatgaaacgtcaaagcagttatgcaaaagatgaaggaaagctttatttagtgccaactccgattggtaacttggaagatattactattcgcgctaaaaaagttttaaccgatgcagattatgtagccgcagaagatacaagaactagtgggattttactggaaaaaattggggttcataataaaatgatctcttttcataagtataattccaaggagcgggcgccggaattgatcaagttgatgaaggaaggtgctgtgattgccgagattagtgacgcggggatgcccgtgatttctgacccaggttatgtattagtacaagaatgcattaagcatgatattccggttgtaccacttcctggtccaaatgctttttcaactgctttgattgcttccggttttaatcagccatttacttattatggctttttaccaagaaaatcatcggaacagaagacctattttgcacagatgcgcgataatagagcaacatcaattttttatgaagccccgcatcgtctagcaaaaaacctcaaaacattggctagtgtgctgccaaaagatcgtcaaattgtagctgcacgtgaactgaccaaaatccacgaagagtttatccggggtagtgtggaagaagttacgaattacttcaatgagaatgctccacgcggggaatttgtgattctagtttcacctaatacagaagcgcctaagcaactatcttggacagaattaattgacttagttaatgacttggttgaaaaaggtgaatccaagaaagatgcaattaaacaggtagccaagcagcatcatgtttctaagaatgaattgtatgatcaatatcaccaggactaattatgaaatataccgaagaatatcaaattgaatttaaagattgtgatgaaaatcgccgattaaagttaccagcactagttgatttgatgatgcaggtttctgagcatcaattaagtcaaggtggtgctgggactgatgacttggttaagcgtggtctaggctgggtcgttactcaatatcattttgagattaaagacctgcctaaaccgggtgatcaagttattctaagtactgaagctagcggctataatcgtttttttgagtatcgtgattttggcgttagtacgcaagacggtaagccattagtgactgtaaaaagccagtgggtaatgctcgacttgaagaagcggcatatggtgccagccgatactaaaatgatggaagattggggtgcaccactacttaaaaagatgccacgttttccaagattgcgtccgcaaaccgaatacgagcaaaagcgttcataccgtgcgcgttacgatgacttagatactaatcatcatgtaactaatagtcattatttcagttggtttgttgatatgttggatcgtaactttttaaaagaacatattgttacagcaattgatattaaatttgataaagaagttcattatggtgagagtataaattcttgcatggacttggttcaatatgatattattattacatctcatgcaattgaagcagaagatgggacagttaaggccgtctgtgaattaagttggcgtgagatatagtaacaacatgacgctattagtcgtttttaattagggaggaatcggtcgaatgaatacaaagaaaattttacgaacggatttacagcaactagtctttttaggtattgttgttgcaatgaaaattattctaagtcagttttcttttggtccagtaatggttaaagtgggactgggtttcattgggagtgtgctattaggatatctctttggtccgctctggggaacaattggcggtggaattagtgatttaatttcatctgcactttttggcgatcaaggtggctttttcattggttttactttaacagcaatggcaggcccatttatctacgccctgtttttatataataagccagttaaaatttggcggattattgcttctactattctggtgactgtaattgtcaatattggcatgaataccttatggctacatattatgtatggtatcaatttcaatgcggctttgatccaacgtttacctaaggagacgatcgttccttggattcaaatggttatcagctactttgttttacaagccgtttctcgtgttaaaataaaaaagtgatttaaagcgaaaagagaaaaatgtataaaatgaaaattttaagtgtttcgacagctactaatcatttgagcgtggccttgaatgatggtcaacaaattattgttgagaaaaatgaacgagatgagcgtaatcatagcgaacatcttgatcctttgattgatgaaatcttaaaagataatgatttaagcttaaaagatattgatcgttttgcagttgctattgggccaggttcttatactggactaagaattggaatcactactgttaagatgtttgccagcattttagataaagaggttgtaggaatctcaactttacaagctttggctaaaggcgttcaagaagacgctttggtaattactggtttagatgcaagaaatgacaattattttgcggccggttatttaagcggtgctgtaccagagaatgtcattccagacggtcattacaatatcgacgttttaattaaggcgattcaagattatgcggccaagcatgaagttaagaaaattgtttttgtgggctcaggtcttgaaaagcaagatgaaaaatttaaagctttgaatattccatatgtttatggaactgaagaagagaatgtcatccatgctgggctaattggacaattagctgaaaatgcggttccagttgatccagataaattattgccacgttacttgcgtcgaactcaggctgaagtagactggcataaaaagacaggcaaaccattcgagccagatagtcattatgttgaagaagtttaatcaatttttccatcaacagttaaatcggattgatatgagttttaccccgtttattgcgaatgtaaacggtaagagactacaaattatgcaagctacagatgacaatattcctgacctgcctgtattagaggagcaagtttattcaggtcggacaccgtggaataagttttcatttgagcgagaactagagaagcggcataattgtctttatttggtagtgtattatgaatcgatgctagttgcatttattggtgcgcgttttactccagaagagacgcatattactaatattgcagtagcgccggcttttcaaaatatgcatattggtcgttacttaatgcaattgattattgatcgggcgcgtgaaaatgacagtgattgcgttagtctagaggtaagagtagataatgagattgcccaaaagctatatcgttccttaggttttgaaggtaccttcattcgtaaaaactattaccatgatactcataccgatgctatgaacatggttttatggttaaaaccacatcagattaaaagaaagaagtttacgttttgagtgaaaaaaatgttcgcattttagcttatgagagttcttgtgatgaaacttccactgctgtcattaaaaatgggcgtgagattgaaagcttaatcgtagcaacgcagattaagagtcatcaacgctttggtggtgtagtccctgaagttgctagtcgtcatcatattgaagtggttagtcagattactaaagaagctttggctgaagctaattgtacttggaaagatatcgatgcaattgctgtgacttatggccctggcttagttggtgctcttttaattggtgtaagtgcagctaaggctgcttcaatggcaacgggtattcctttgattggtgttgatcatattatggggcacattatggcagctcaactaaaagatgagattgaatatccagctcttgcattacaggtttcaggtggacatactgaaatagttttacttaaggatcctgttcattttgaaattatcggtgatacgcgcgatgatgctgctggcgaagcatacgataagattggtcgtgttcttggggtaaactatccagcaggtaaaactatcgatgcctgggctcatgaaggcaaggatacctttaacttcccacgagcaatgatggaagatgatgactatgacttctcattctcaggtttaaagtcagcttttattaacacttgtcatcatgctgatcagattcatgaaaagttgaataagtatgatctggctgcaagttttcaagcagcagtaattgatgttttggctcataaaacaattcgcgcaattaagcaatataagcccaagacctttatcatgggtggtggggtagctgccaaccatggcttacgtgatcgcatgagtgcaggaattgctaagttgcctaaagcagaccaacctaaggtgattttgccagatattaagttgtgtggtgataatgctgcaatgattggggctgctgcgtataatctttataataatggtcaatttgcggatttgactttgaatgctgatccatcacttgaattgccatatgctaagagcatgttgaattaaatagaataactttttaaatcaaatacctagaacgattatttctaggtatttttttctactaaggcatggtccttaggatcttttaaatctaaggcgattgattcgtaagcgtcaaataaaatagtgtacttaaaaaccgtcccagttactgttatactgagacggttatttaagttcttttatttacaatttatctggatcttctcttgccacggtaaataagcttcaagggtttccgaatccagaatctcttcattcggtaatttctgaagcaaataattcaagtacttttcaggatcaaggccatttctcttggcagtttcaattaagcttagaataaagccacttgcagtagcaccctcaaaactttgagaaaataaccaattcttccggcccatgacgagtgattttacagcgcgttcagccttattgttagataattctaaattgccatcaagcaagacatgctcaaaagtagcttgatgcttgagggtataattaatggctcttcccaatttagagcctggcaaaacggtgattttatttttctcacaccagttgaagaactcttgcatcagaggcttgagctttgcttgtcttagctggtaacgttcttgtttgctcaaattctcccaggtttgttctaagtaaaacatgcgattgcagtagttgagtccttttggggcaagggacttttcagaagcctgttgtggtacggcttcgtgaaactttcttctaacatgagcccagcagccaactaaagttgctttcggcaattgctcataagcctgccacatatcacagtgcaaataaccgggatagtttcctaaaaagtttaaggcaaccttgcaactccgggaaggatcatgatgatagagtgtaatcccgtattgatcatgtttgcctgaaaggaagacccaatagtaagtcttgattgttttactttctaagactgtataataagtttcatcggcatgtaaaattggccgcattaacagcttttgcttaagcagatcatacactggtttaaagtagtattgactgcttttcaaatcccaataatttaacatctgtcttgaaacttctagtcccatcttcttccagtcgctttcttgacgatagtccggcaccttcatttcatatttttgataaagtgaatgagcgatgagtgaagctgaacctagaccatggtttaggggagctttaggtactgcagctttaatgatcttgtcgctaagatttctttgactgcaatatttacatttgtaagcatgttggatatggtctaaccttttaagttgagctgggataaacaataattcttggcgaactgactgcttgcctatctcaatcagttcatgatgacaatcaggacaatgcttgtcgcctaattcatggtgaacctcttcagctggaagggcagctagtaagtcagcacgctttcgtttgtgagcttgtcttttataagtaatagtctgaacggcggcgtcggggacgttctccgtcatcttgagcatcaggttcatcaaagagacttgtttgtccatttaaaggcatttgttctgaagatttgccataacgtttttgcgttaagtaagctacttgttcacggaggagcttaatttcatcagttaagttttgaatagtagttgcttgttgtgcaataatcttttccaaattttcttgtgacatgagttaaacttcctcctaaatttattagttaaaagaatatcaaaaaagcgtgcgatgtcaagtgttagtagaattcgcacgctttcgtgttctttatttttggattgattgcgaagcccttcattagccagtcgacctgctcagaagataaagcttgaacttcattttgattcctgggccagttcaattttccattttcaaatcttttgtagagcagccaaaaaccttgtccgtcccaataaagggctttgaagcggtccttgcttccgccgcaaaagaggaagactttgccgctaaaaggatcaagttcaaactgttctttgactaaagttgctagtccatcaatgcctttacgcagatccgtcttgccgcaaacgatatagacttgccctaagtcactgagcttaatcatggcaagactttctcaagcagcttattcataatttcagggtctaagctgctgtaaaaattcagctctaagtcattcttctttaaactaagcaacagattattgcgtggtggacgagccttcttaggtttagaagaacggccaagtgccacaatgggttgttgtttttcgatcatattcttaacctccattaaattgatgagattagaatacctgaaaaatacggactaaaaaagatactcggttatatgacgcttacattgattccttgcctgcgttacagattctaaagtattcgctagaaccatctgcgatatatggccccatgtgacgcgtgtcatcgcctgtttttctttcgatatgaattacccgggcaccactatctgcgagcattctggtacaagtagggcctgagaggacgtgggtaaagtcaataacgagcatcccgcttaaaggataaggtttgtttttatctaaatgactgttttttgcttctagctcagcataattaggttctgtcatagttgtacgctttctattttaaaaagaaaaagcttttcgaagtgaacagctttttgatgagaataaattaattattcacccttgataacttcagtacgtggattcttaggaccttgagccttagaaattacgccttcttcagtcaatttttcgatttgatctggatcataaccaagtgaagctaaaatttccttgttgttttcaccaagatctggagcacgcttgtagttagaaagtgagaatggcaaaccaatagtcttgaacttaccacggttaccaccttggtcgatggttacgatagtaccatccttgttcaagtccgggccattttcaatttcgtgccagtcaagaactggacctacaggaatacaagcagcaccaagcttcttagttaattcatacttgtcgtattgcttagtgtagctttcaattaatgggtaaatttcttccttgtgtaattgacggttgtgccagccatcaaagcgaggattagtaatccattctgggtgacccatagtgttggcaattgctgcccagctcttgtcactgttttggataacgatgtaaacataagcgttaggattagtttcccaacctttagccttgtaagtccgaccgataacttggccaccttcagtgttctcagcacgaggaattgccttgccccatttccagttagggtaaacagcgtagtgaggaagggcacctaagttgtctaacatgatttggttacgcaacttgatacggcagaggttcaatacagcgtcttgcattgactggtaaacaaaagtaccttcactggtgtgttcacgttgaagaagggcagctaagataccaatagtaaggtgcatccctgggtttgagtcacctaaagtagcagctgattgagtaggaacgttggctttgccttcgttccaaccagtagcagaagcagcaccaccagcagattgagcaactggttcaaaggccttaacgttttcaaaacgtgaatcttcattgagcccttcaatgatgcatagatcaatcttgggttcaaagcgtgaagcttttcccaaccaaaaccgttacgatcagctgaacctggtgcaatgttttcaacaaagacatcagccttcttagccaagtcgtacataatctttttaccttcatcagtcttgatgttcaaagtcaaagacttcttgttggcgttcaattgcaagtagtaaagactccatgaatcttgaatatcaagtaattcatttctagtagggtccccagtgttagtacgttcaatcttaataacttcagcaccaagccatgctaaaagttgagtacatgatggaccttattgaacttgtgtccagtcaacaactttaataccttttaaaggtgcatattcattttcttcagtcgtgattaattgtccttatcttcaagttgtgctaaatctaattctgggtttaagttaccaatgtgaccagattccttacccattgattcaggaatttgagcatcaataattgaaggattacctgattcgtaggccttttcaagagcatccttcatttcagcgtagttacttacacggtagctgtcaccaccaaaggccttagcgatttcagcatagtgagcattgtggcttaaaacagtaggtcctaattggtctttaactgggttacggtcaccattgtagataccaccattgttaatgatgacaacggtaacaggtaagtggtaacggcagatagtttccacttccattccatcaaaaccaaaggctgagtcaccatgaagtgagatgactttcttaccagtttcaacagctgcagcaatggcataacctaagccgacacccattacgccccaagtaccagtatcaagacggtgacgaggtttttgcatgccgattaagttacgaccgatgtccaaagtgttggcaccttcacttacgatgtaagtatctggatgcttttgcattaagtcattgattggttcaatcgcactgtaaaagcctaaagttggcttagcttctgaggcagcaattcttttggcaaatttttcattgttagcttcacaagcattcttaattgaatctagccagtcttgaggggccttaacgtcagctttttcaagggctgcgtttagtttttgcaaaacagaggtaatgtcaccttgtaatggggcatcgatctttctgtttgagtcaaattcagtagcgtcaatatcgacttgaacaaacttagcatcttcattaaacaatggagcctcaccatttgaaagcatccaattaagccgagcaccgattaataagactacatcggcttgacctaaagtaaatgaacgagctgaagcagctgatgatggtgagtcatctggtacaacgcctttagccattgacatcggcaaaaatggaataccagtcttagtaactaattctctgacttctgcttcacttctagcataagctgagcccttacctaggataatagcagggtgtttagcgttttttaataattcaacagcacgttcaattgcgtcatctaatggcaattgctttggagcgggatcaactacttcatagatatgagcgtctgacttttgtgcaactgtgtcggcaactgttgcagcaggaaggtcaaggtaaccaccaccaggccgaccgctcatagcagttctaacggcacgagcaactgctaagcccatgtcttcagcacggtcaacacgataagctgctttacataaaggtttagcaacattgtattgatcaagtccttcatagtctccacggtcgaggtcgatgatatgacgatctgatgaacctgagatcataatcattgggaagcaattcttagtggcttctgctaaagcagttaaaccatttaagaaaccaggagcagaaactgttaaggctacaccaggcttgtcggtaagaaaaccagcagcagcggctgcgtctacagctgcatcttctcttctaaattcataaaacttcataccctttaattcagctaaacgggcaaagtcagtaactggaatgccgacaacaccatacatgttgtttaaaccgtttgcttgtaaagcatcgattaaaagtgcagcaccagtaagtgatacattttgtgtcacgaaaaaaattctttcaaaaaatcaccaaatgcttatgtttatgcatttcaaaaccaagatacacctcttgaattgtatatacaggcataattgaataataaggtacgttattttaatatacgtatataaaaataagcaagtcctaatatattagaacttgcttattatacttttattcaaaattgtccatttcttcgattgccttttcccaggcagaatttgcttcatctaatttctgttgtacatcagaaagctgttcttgcagtggccccaatttatcaaagcttgaagcaatttctggattggccatttcggtttggatttcttgctctcgttcttcaagctgttcaatttgtttttctgcattatcaattgcacgctgcaactttctcttttgagaatcacgttgcttttgctcttggtaagaaagtttttgctggctaatttgtttgcttggctcgacttctggctcagcggcactattttcagccatagctgcttgttttgccttctcatcaagataataagaataattgccatcgtagactttagcatgcccatcgcgaactaaaacaatcttattagctagttgattgataaagtaacggtcgtgggaaacaaagagcagggtaccatcaaagtcttttaaagctttttctagtacttcttttgcttcgatatctaagtggttagttggttcatccatcagtaagaagttatcatgctcaagtgataaaacagttaaagttaaccgtgctttttgtccaccagataattgacctaccgttttatcaatgtctttagctgtgaataaaaaactggctaagattgaccgtacatcgcgttcaggcatggttttgtgacgatcccaaacagtatccaatacagtcttagatgaatctagtccttgtaattcttggtcgtaataaccaatctcaagggatgcgccatacttaattgagccactcttgggcgttaattgcttcataatagtcttaagcagggtagatttaccgattccatttggtccaatgatcgcgacgcgatctcctttattaatctggaaggaaatatctttaaccatggttttatcgggataaccaatcgtcaaatcgttgaaaattaatacttccttgccagaaggatgatcgcttgaaaaatgaatccgtaccttatttttatgtttaggtggagtaatccgctcaattttttctagttttttacgccgactttgtgcacgcttagtggtagttgctcgaaccaagtttttttggataaattcttcatcttttttgatttcagcttgttgcttttcataagcggcttcttggtccttatcacgttgctcgcgctgcatgacataggctgaatagttgcccttaaaagcagttaatttaccaaattctagttcaaaaatttgggctgctaaatgatctaagaaatattggtcgtgggaaaccacgaggattgcaccactgtaattctttaaaaatccttccaaccaatctagggtatctaaatctaagtagttagttggctcgtccaataacaacagagcaggtttgcgcaaaagcaacttaacaaaagctaaccgtgttttttcaccaccggataaactaccaatcttcttttgccaagtgtcttcaggaaacttaaagccattcaagatacttttaatatcagattgataagtataaccgcctttttgttcaaagttgaattgcttttgatcgtattgcttaagcaattcttgatcttcaggatgatctgcaattttttcttgtagttggactaagctttttctttcccttattaaaggagcgaaaacggtttccatttcatcccaaatggttttattttcatctaatgcattttcctgagcgatataaccaacatcaatgcctttattaactgtaaattcgccgtgagttggttcttgctcacctgtcattatttttaacagggtagtcttaccaaccccgttaggaccaactaagccgattctggcattggaatcgattgaaaaattaacatttttgaataatgtgttggccccaaattgttgttctaaatcgtgtccttgtgcaataatcataatttttcacctaaccactattctaccatatagcgcaaattgtttgtttttaagttaaatatgtgaaaaaatgatgatttgtgaaaaagatacttgcataagtactatcatagcaggtatgatagtagtgcttgattgtacattcacaaacatttaagtttggagggttcctatatggaaaaaataaaaatcccaaaagcaacggcaaaaagattaccattatattaccgttatttgattattttaaatgaagaaggcaaagataaggtttcttcaactgagctgtcagaggcagttcaagtagatagtgcttcaattagaagagacttttcatattttggtgcgttgggaaaacgtggctatggatatgatgtaaagaatttattgagcttcttcaagaaaattttgaatcaagatactttaactaatgttgctttaataggtgtaggtaatctgggacgggcgctgcttaattacaactttaagcgcagtaataatattcgaatttcctgtgcttttgatatcaataaggagattactggtcgtatcttaagtggtgtccctgtttatgacatggacgacttaaagcaacaactaagtgatcaacagattacaattgcaattttgacagttccttcaacagctgctcagaaaaccacagatgaaatggttgatgcgggtgtaaagggaattatgaactttactccgattcgtttatcagctccagctgatgtgcgagtacaaaatgtagacttagcaaccgaattgcaaacgttgatctatttcttagatagtgacaaagaaaactaaatttgagtaaaagaaacatactaacctagtgttggatcatgaatcgacggattcacgatctggcactttttattttgtctaaaatagaaagtgaagataaagcaaatcaagtcttcagctttttagacacttgatgtcgtaaaagaaacggactgctttaccacctattcttaagtctcttcgaagtctgtgggcacttagatgccgtgtttagaaaattagaattaataggttgataaagaggtttatcttcacagcggaggttatattatggaatcacaaattattttcggtattgatgttagcagtaaatcttccacagtttgtgtggttaatgaccggatcaaacaaggcgaatcttttagaatctctaatgattcctttggctatcaaaaactttatgagcaactgaaccaatatttgataactcctttagttgttttcgaagctactggtgtttattctctaagcctgcaagctttcttagaggattatcatattaagtatttgaagcttaatccgcttaaagcgaaaaagctaatggacaataatttacgccataataaaactgataaggtagatgcttatcgcctggctttaattcaatttaatgccccgcaaaagctgcgtgatccacagcccagagagtatcatgaacttcagaatgccagtcgctattatgaagaacttactaggagtatagttactactaaaaatcaattgcaccgcaacctccaatccactttcccacaaattgaagaaatactgtctcatccatctggcagaatttattgggcgcttgttagtcttttcccacatgctggatatgttctagaaaagaatgagacacaggtaactcaaatgcttaattctatttctggaataggacaacaaagggcacggtacttaaccacaagattatacgcttttgctagagaagcttatccttatgattccaaagatagtattatcgttagagctattcaaaggaacatttctaatttattttcactccagcaagaacgcgactatgtaattaactacatggaaaagctggctaaagcagtaaacgctcgtgctttatccatctatttgagtatcccaggggttgctagaattacagcagtgagattagtagcagagctcggtgatctaagacggtttagcacttcagctcaaattgatgcgtttgttggcattgatccaggaaggtaccaatctggtgaaaaagacagttctcttggcattaccaagcatggcaatcatattgccagaaaaatactttatcgagttattactcaaatggagacggtaaaggctacgcagccttgccatataactgattattatgacaagaaaaaacgatcttcaaatagacaaggctataagaaaatcgccattgcatcagtccataaactgatacgcacaatgtttgctcttatcaaacatgatcaattatatgattacaacatagccaccgaaaataaaagactttagctgaaatcaaataatcaacttaagtataagcaacctatggaaaaactacaagtattcataggcttatttgtggtactttcgctttttcttaaatttaaactcttatttgctttaaccttattcgcatcattaaaacaagtaaatttattttcttaaatcattgataatacttgactttgggtagaaaaaagccgattttcggctttttttcatgcagttgtttcacttttgattaatttgacaggcaaaatataattcttttggcgcaatttttcgtcgggattggaaattcgggtaagcaataacttaaccaataaagttgcaatatcatgaattggctgagcaattgtggatagttccgaatggtaagtttgaatttgctttgttccgtcaaaaccaatcacttttaattccttaggcactttaatgcctaatttttttgcttcttgtaaaactaacactgcagttaaatcatctgtgcagacgacgccatcaggctgatcattgactaacatatcatgaattttcatatttttaatgttggaagaatcagaaaaagcaactgaacgaatgtgggctgaaaagtgacattcctttgcttcatcaagataagctgctagtcgttcgtcagtcggattaccttttctgtgttcattgcccagaaagtaaattttgtgacaaccagcttgaaccaagtcatgtactgccaacttgatgccttgataattatcacaactaacaattggaacattatcagatagctttcggtcgaaagagacaattggcaaacctagttgttggtattcattgatacctagattgtgcgcaccagcgatgatgccatcaacttgattagcctgaagcatgcgcagatattcgcgttctttttctttgttttgtcctgcattgcataggattactttatagttttgttggaataaagtggtttcgatatcctgtactaattccgcaaaaaaaggattagtgatctcaggaaaaatcaaaccgactaatttcattttctttccttgtaatgagcgggcaatagaattgggacgataatttaattcccgcattgcggcaaaaactttatctttagttttttgacttaaatagccatggttgttgattactcgcgaaacggtagttacagagcaaccggcttttttggcaacgtcgcttaattttgctgccatagtatcacctgatgtttaaagaattgtttgcatttgccaaagcttgccagtgtagtcaatgtcttgagcaaacgcaatttttttgttggtctgatcggcaaagtagcgtccagtcaataccttttcaccatcattaacgaatacttcaattaatgaatgatcaacaaagatatcaagcttgaggtcatgatttggtgaaagcgtaatagctcgactttcgccataatcaactgctactttttgcccagcatgagcacgatctaatactaatttaccatttttggtatcgaaattgagctgtaaactgttacttaagtcattatttgcagctaaatgtaaagtgccactttggttagccttaattgttaattcaagttcaaattgttggccggcttgatcgctgactacttgattagatatgcttgcttcgtttttgcggatactgcttattgccttaactggcgtttgaattaacttgtcactctttaggtggagttccttcacttgactcaagcagttagcccagttttcatcatcagtagggtaagtagtgtcaggcaagccaacccaactgacttcgtaggcattaccatctggggcgttaaaggcctgagtggcataaacatcgaacccgtgatccaaattgtgtaatttacctggattaattaacttatgattttcccagtcaatatcatcagcaataacgtacatatttgggtaaatgtcatcataagctgctacttttttgtctaaaccctgaggacagaaaatgaccacgactttgccatcaacacggacgatgttgggacactcgatcatgtagcccatgtcttcgttggtaaagtctaagaagcccaattcttcccagttctttagatcctgagacttccaaacgtcaatgtgaccgtgtttttcctttttatcttgggcacctaaaattgcgtagtaagtgtcattttctttgataatttggggatcgcgaaaatgttcggtgatgtgatctggattcttaaataggatggttttgtctgaaactttattatttttatccatccaagcaccgatttgataaggagtacgtacccaattttcatcgcggtggttaccggtatacatgatgaaaagcttaccatcgatttcgcgagcagagccagaataagctccatgtgaatcagccattgtgtctggttcaatacctaagcctaagttttcccagtgaaccatgtcagttgatttgaagtgccaccatgactttagaccgtgaactgcgccgaatggatatgattgatagaagaggtggtaagcaccatcaaagtaggaaaatccattagggtcattaattaagccagaaataggatgcaaatgatagcgcatttggtaaggggagtttgcggcttgtgcttgcaaatgcattaatgtatcagcgtcccaatcttgataaggtaagtaacgtttttctcttgtccattccataaatatacctccatgaaagcgttgtctttttacatgtattttaagttagtatgaaaaatatgtcaaacgtttaacagaaaaaataattattaattcataagtaataaaataaataaagaattttatgtcaaacgattgacatattttttgaatgcgttatcataattagtgaattgagaataaaacgtttacataggagggatcaatatggaccacagaaaagtggctgaacgagtaattaaagacgtcggccgtgacaatattattgccggtgcccactgtgctactcgtctgcgtttagtattaaaagatgattcaaaagtcgaccaaaaagcattggataatgatccagatgttaagggtacttttaaaaccaatggtcaatatcaagtaattattgggccaggagatgttaatgacgtttacgatgagttcattaaaatcactggtttgaaagaattatcaaccgatgatttgaagaaggttgctgcagaaggtaaaaagaagaatccagtaatggatttcattaaacttttgtctgacatctttgttccaatcattccagccttagttgctggtggtttgttgatggctttgaacaacttcttgacttcaccaggtctgtttggaccaaagtcagttgttcagatggtaccgaatgttgctggtatttcaagtatgattcaagttatgtcagcagctccgtttatttttatgccaattctagtcggaatgtcggcagctaaacggttcggtgctaaccaattcttgggtgctacaatcggaatgattatgacgacacctggactccttggtgcaaatcacttctgggacatttttggcttgcatgttgcgcaaactaactatcaataccaggttattccagttttagtagctgtttgggtattgtcaattttggaaaagtacttccacaagcacttgccatcagctgttgactttacctttacgccacttctttcaattatgattactggctttttgacttttacaattattgggccagtcttcaaaggcgtatcagatggtattaccaatgctatcgtttggctatatgacactactggtgcctttgggatgggtgtctttggtcttacctattcagctattgttactactgggcttcatcaaagttttccagcggttgaaactcagcttttagcagcctttgctaagaatccagccagctctggtgactttatctttgttaccgcatgtatggctaacgtagctcaaggtgccgcaactttcgctgtttacttcttaactaagaacaagaagatgaagggcttggctagttcatcaggtgtttcagcacttcttggtattactgaaccagcacttttcggtgttaacttgaagtataaattcccattcttctgtgccttaattggttcaggtgtagctgctgcttttgcgggcttgatgcatgttactgcagccgctcttggttcagctggtttcttaggcttcctttcaatttatcctaagactattccaatgtgggttgtttccgtattaattagttttgctgttgccttcatccttacttatgtttatggtaagggtcatttgaaggaagaagttgctgaacaagatgttccagtaaacgacgcaactgattatgctgaagaaactcaaaaggctgaaaagcttggtaaggaacaaatggcattaaaggatgaagttattgcttcaccagttgatggtactcctgagagtttaactaaagttaatgatcaagtattctctgctaagttaatgggtgatggtgcagccgttattccaagtgatggtacgatctattcaccagttactggtactgtgactattgcttatgaaactaagcatgcttatggcattaagtcagacgatggtgcagaagtattgattcacattggtcttgatactgtaaaccttaagggcgagcacttcgaaagtttcgttaagcaaggtcaaagagttaacaagggcgataagcttggtacagttgaccttgatgctgtgaaaaaggcaggctatgatactactgtcatggtagtaattactaacactgccaactatgcaaatgtttcaagaattactgatgcgggtgacaagcacggcgacaagttgattgctgttactgcacacaattagtttcttctactcctctagaaaaaattaaaacaattagaataaaagacgctaagaaagattgtttcttggcgttttttagtactaagtgctgcacttcaattttaagtttgagtaaaatgttctctataaagaaaaacaaagtgagggtatgttttatgaagttaaaaagtggagttattggagtattagtaactggattaactgtctttagcattaatctaactagctctaaaataaaggcagcgataacagtgcctaatcctaagacagattatgtagttaaaactacttctaatgtgtataagagtaatggtaagaggaccagttttaagacacgtggtcagatacaaaccggtaatgttccagtaattgaatcacaactatatgaaggcaagttcattaatgtgcaaggaactaagacgattaatggtactgcttattataagatcggtcctaacgcatacattaaacaaaataatgttttaaattatgctcaagaaaaagcaaagcttgaggcatatcaggcacaagatgatgtgaatgatgattcagatcagtcaacagaattaagctctgatgatgtgaattttgacatagcttggtatgacaacattaatgaggatccatctccagcgatgttcgatgattcaggatatcataatagagtgattaagaatgctcgtaaattattaggctatttcacttatggaacaggtgcataccgaactaattttggcagttggcgtcatcctaataaaaacggttcaactgattgttcaggatttgtgtggatcgtaatgaagagagcaggatatcgtgtaggaaatgctccattttttactctgccaatggaacgagatgctaaaagtactcatggctatttgaagaaaatttctgccaagaatattcgcccaggtgatattgtgattgttaatactggcaatggtgttggtcaaaacggacatgcagcaattgttgatggcaaatatgatggttgggacacgcaaattattgaagagggcggcaacttaggtgtagatgatgtgcaccgctctagtttaggtagctcactgagcgataagctggccaaaggtcgaatcacttatgctcgccccgttaaatagtatgctctatgctataattttgctaatcaataaaggataataagaatgaaaaagaacagcacgcttaaacatgtctggattatgacggctgtctattgggtagtaggtattctaagtattttctggggtaagcttgatcatacttttgcgtctcaattaaaagagatcaataatatttacgtgttagttttaataattatcttaagcttgccgctacttttatcgctgttattgtcggttaaagtaaaaatgccacgtttgatctgcaatccactagttgctgtaatttatctattagtggtaattgcagcaggtgtagcatataacttacaaaatattattggctacttcttcccaatcatcctcttcattattatggcgctagttgctgttttctatgctttggttaagacttttagcagcagaaaaagtggtaaatatttttttattgatggtaaagataagaaagaatgccatgatttctgggatgcttataagaagtactatgtaatgggattaacttacggcattattgatggtttgattactgtaattagttaaaaaagttaagaaaaatcaaaattagcactcaattgaaaaaagtgctaattttttcttgctttttttcacaaaacagtttattatcatatttgtaagttagcacttagcaaataagagtgctaatgattaatacagtaataaaaaatataatgaagaaaattaaacataagggggactaaacgtgttacaaccaattggtgatcgcgtgatcgttaaagttaagaaagaagaagaagaaactgttggtggcatcgttttagcatcaaatgctaagaagaagccaactgaaggcgaagttgtagctgttggtgaaggtgcttacgcatcaaacggtgaaaagattccaatggctgttaagaagggtgacgtagttctttacgataaatactcaggcactgacgttgaatacgaaggtgaaaagtacttagtccttcacgaaaaagacattttagctattgctaagtaatttagttaaaatttccaacgataattaagtaaattaaggagcatagataatctatggcaaaagatattaaattctcagaaaatgcaagacgttctcttttaaagggtgttaataagttagctgatactgttaagactactattggtcctaagggtagaaacgttgttttggaacaaagttacggcaaccctgacatcactaacgatggtgttaccattgcaaagtccatcgagttaaaggatcactacgaaaacatgggtgctaaacttgttgctgaagctgctcaaaagactaatgatattgctggtgacggtactactaccgcaactgttttgactcaagcaattactaatgaaggtatgaagaacgtaactgctggtgctaacccagttggcattcgtcgtggtattgaaaaagctactgaagctgctgttaatgaattgcacaagattagccacaaggttgaatcaagagaccaaattgctaacgtagctgcagtttcatcatcttcaaaggaagttggtaacttaatcgctgacgctatggaaaaggttggtcacgatggcgttatcactattgaagattcacgtggtatcaacactgaactttcagtagttgaaggtatgcaatttgatcgtggttacttatcacaatacatggtaactgacaacgataagatggaagcagatcttgataatccttacattttgatcactgacaagaagatctcaaacattcaagatatcttgccacttcttcaagaaattgttcaacaaggtaagtcattattgatcattgctgatgacgttactggtgaagctcttccaacacttgtattgaacaagattcgtggtaccttcaacgttgtagctgttaaggctcctggctttggtgaccgtcgtaaggctcagttacaagatattgctgctttgactggtggtactgtgattactgatgacttaggtcttgaattaaaggacactaagattgatcaattaggtcaagctcgtcgtgtaactgtaaccaaggactcaactactattgttgacggtgctggttcaaaggatgctattcaagaacgtgaagattcaatcagaaagcaaattgaagaatcaacttcagactttgacaagaagaagcttcaagaacgtcttgctaagttaactggtggtgtagctgttatccacgtaggtgctgctactgaaaccgaattgaaggaacgtcgttacagaattgaagacgctttgaactcaactcgtgccgctgttgatgaaggttacgttgctggtggtggtactgctttagtagacgttgagaaggctatcaatgatcttaaggctgatactgcagatgaaaatactggtatccaaatcgtattaagagctttgtcagcaccagttcgtcaaattgctgaaaacgcaggtaagaatggtgaagttgttttgaaccacttactcaagcaagaaaacgaaattggctacaatgctgctactgatacttgggaaaacatggtagatgctggtatcattgacccaaccaaggtaaccagaaccgctttgcaaaatgctgcttcaattgccgctcttctgcttactactgaagctgttgttgcagaaattcctgaagaaaagccagctaacccagctccacaagctggtgcaccaggaatgggtatgtaattatatatcttaatgctttagcatttagatatataattcttgattacgaagtaatcaagttcatttacagtgctttagcactaaacttatgcacaaactctcactctagttcaaaaacaaatataattaaaatgacttcgaagttaaacaatcagttcagcttcgaagtttttctttttgtagcgtataatattgtacgtaactctatctaaaatacgaaataggaaagagacataaatgacggaaaaaacaactccaatgatggagcaatattacgaaattaaaaaacaatatcctgatgcctttcttttttatcgcgtcggagacttttacgaactgtttgaagatgacgcagttaaaggtgcacagattcttgaattgactttaacgcaccgatcaaatagaactaagaatccaattccaatggcaggtgtgcctcatatggctgtggatacttatgtaaatactttagttgaaaagggttataaagtagcactttgtgaacaacttgaggatcctaaaaaggccaaaggcatggttaaacggggaattattcaattagtgacgccgggaaccatgatgaatgaaggcccaaatgatgctaaagattcaaattacttaacatcagtaattaccactaagagtggctttggtttagcctacagtgatttatccactggtgaaatttatgctactcatttaaagagtttcgatgctgtttccaatgagctcttgtcacttcgtactcgtgaagttgtgtataacgggtcattatctgaacaaaataaagactttatgcacaaggccaacattacgatttctcgacctactccaattgaaggtgaacatgctgaaatttcttatgttgaacagaatttgactaatggggctgaaaaagaggctacccgtcagttagttggctatttgctttcaactcaaaggagaagtttagcgcacttgcagattgccaaaagctatgaagtaaatcaatatttgcagatgtcacatactgtgcagaataatttggaattggttgcttctgccaaaactggcaaaaaaatgggttcacttttctgggttttggataaaacacacactgccatgggtggacgcttgcttaagcagtggctagctcgtccattattaaacatggatgaaattaaccatcgtgaagaaatggtgcaggccttgcttgatggctactttacacgagaaaatgcagttgatgccttaaagggtgtttacgacttggaacgtttaactggtcgaattgcttttggtaacgttaatgcgcgcgaattactacaattatcacgttctttgcaggccgttccagttattttagatgctttagagcaatcagattcagatatcttggtcgattttgctaaaaaaattgatccattaaagggcgttgccgaaatgattacttccactatcgtgaaggatccacctgtgttgactactgaaggtggcctgattcaaggtggggttgatccgcagcttgatcgctatcgggatgccatgaacaatggaaaaaaatggttggctgaaatggaagcagatgagcggcaaaagacaggtattgataacttaaaggtcggttataacaaggtctttggctattatattcaggtttctaacggtaacaagtctaaggtgccacttgatcgttatacgcgtaaacaaactttgactaacgctgagcgttatatcacaccggaactcaaggaacatgagaatctaattcttgaggcacagacacggtcaactgacttggaatatgatttatttgttaagctgcgtgaggacgttaagaagtatatccctgctttacaaaaattaggtgggcaattagcagcgctggatgtttattgtggttttgctacagtagctgaacaaaataattattgccggccaacttttcacgcagataatcaagatattaatgtgactaacggccgtcatccagttgtggaaaaagtaatgacggctggttcatatattcctaacgatgtcaaaatggatgaaggaaccaacatttatttaattacaggtcctaacatgtctggtaagagtacctatatgagacaaatggctttgattgcgatcatggctcaagtaggttcctttgtgccagctgatagtgctgatttgccaatttttgatcaaatttttacaagaatcggagcagctgatgacttaatttcaggtcaaagtacctttatggtagagatgagtgaagctaatgaagccttgcagtatgctactaagcgcagtttggttctctttgacgaaattggtcgtggtacggctacttacgatggaatggctttagctggtgcaattgttaagtacttacacgacaaagttggtgctaaggcattatttgctacgcactatcatgaattgacagtgatggatgagactctggatcatctgaaaaatattcacgttggtgctaccgaagaaaatggcaagttaatcttcttgcataaaatcctacctggacctgctgatcaaagttacggaattcatgtagctcaattagcaggtttgccgcgcaacgttttgcgagaggcaactaaattattaaagcggcttgaagcacaaggcagtgaactagcaccagtttcgcagcaattagatttatttgcagagcctgtggaaaacagtgttgaagaaactgaaacacaaaatgacaagcccgcaataactgatgcacaacaagatatacttgatgatatttctaatctttatttagcagataagacaccgttgcaggttatgcaaatggtagctgattggcaaaaagatttaaaggatgacgattaatgagcaaaattcatgagttatcggaaactttaactaatcagattgcagccggagaagtaattgagcgcccagctagcgtagttaaagaattagtagaaaactcgttagatgctggtgctactcgaattcgcgttgattttgtagatgctggtttgaaacagattgtagttcaagacaatgggacggggattgcacgtgatcaagttgatctagcctttacccgacatgcgacaagcaagattgccaatgaacacgatttatttaaagtttccactttaggcttccgcggagaagcattagcttcgatttctgctgttagccatgtggaaattctgactgcaactgaaaacgcaattggtattcgagctaactatagtggaggcaataaaaaaggccaagaagatgcagcggctcgtaagggaacaaaaattacagtcaaggatttgttctttaacacgccagccagattaaagtatttgcgtagttcaagaactgaaattatgaagattgtggatattattaatcgacttgcgttaggttatccacatgtgtcttttactttgtcaaatactggcaaaattttattaagaacgccaggaaataataatttaaagcaaacagttgctaacgtgtatggccgtcatatcgcagaaaaaatggaaaaatttgaggcaaaagacagcgattttaagattacaggtctgatgtctaaaccggaattaacacgttctacacgcaattttatttcgattctcttaaacggccgctatattaaaaattttcaattaaatactgcgattctggatggctatggctcaaaattagcagcgcggcattatccgattattgtgttagcaattaaagtagatcctttgttagtggatgttaacgtgcatcccactaaacaggaagttcgtttatccaaggaaaaagaactgggtcgtttaatcaccagtgcaattagtaatacacttgtggaaaaagttggacaaattagcgcttttgctaatttggaaaataaacgtgatacgctagttgatcagcttagttttaacttaaatcaagatgttgtaaatacagctcgtaaaaaagaaccggaaattcgcgaacaagaaaagccaaaatttttaacgattgaatctgatgattcagaagataatattcaaaatgaggcggtaaagcaggatagtgaaaagaaatatgttgatcttaatcagccacgtgaagatgatcaatatatcgttactaagacctggaaacaaaatgttgctctgcagcaagcactaacgccatttcctacaactaggactaatcaggaagtcatttcaagtggggatgaaactttagctaataatctgcctcgcttggtttatgttggacagaccgatacttatttatttgcccaacataatggcgacctatttttaattgatcaggttgctgctagacgaaggttaaaatttgagcaaatttttcacatgataactgccaaaaaagtagtacaacaaggtttgttaacaccaattattttagaatttggtaatcttgattttatgcaaattaaggatcaagtagaacagattaagcaggttggaatctatttggaagattttggacaaaatagttttattgttcgttcgtatccaacttggattcacgataatgtcgaagattcaattcggaagattttagatggttatttgaatgtggataaaggaaaggcaaagaacctgtttagccggatagcagcaatgcaagctaagcgagaaattactggcaagattaaattatctgcagctgaagctgagcaaattttacttgatttacgcaagtgtactgatccatatcatgatgcagatggacggataattttggttagaatgagccaaaatgaattgagaaaaatgtttaagaaggatgaataatgtacgaatattttgaaggtgtgattactgtggttacaccaagctatgttgtagttgatgtcgggggcgttggctacaaggtctatagtcctacaccttttgcctatactcaaggccaaaaagctaaggtctttattgagcaagtggtgcgtgatactggcattactttatatggttttcaaagtcaagatgataagggcttgttcttaaaactacttagtgttagcgggattggtcctaagagtgcaatggcaatcatggcagctgaggatagtaattctttggcggaagcgattgaacaaggtgaagttaagtacctaactcgttttccaggtgtgggtaaaaagacggcttcacaaattgtgcttgatttgaagggtaaattaggtgattatgttgctcggcttgatcgtccagacaatggtgagaatgtgccgccagcattaaatgatgcactgcttgctttaattgctttgggttatacccaaaaagaagtggatcggatcacgcctaaactggagaaagttgctgcaaatactgcagatcaatatattaaaaagggcttagcattactgcttaaaaagtagatcttggtataatagaacagatgattattttttaaggaagtgaaactggtggcagaagatcaagtaacttcaggtgatattgagaatcctgaagaacaacaaatggaactttctttgcggccgcaaacgctcgaccagtacttaggtcaaaagcgggtcaaaaaagaaatgagcatttatattaaggcggcgcgccaacgtgatgaagcattagatcacgttttgctttatggaccaccggggttaggaaagacaactttggctttcgtaattgccaatgaattgggagttcatttaaagagtacaagtggtccggccattgaaaaggcaggcgacttggtggcacttttgtccgacttagatcctggggatgttttgttcattgatgaaattcaccgtttagctaaaccagtagaagaagtactctactctgcaatggaagactactatatcgatattgtgattggcgaggggcagactactcatgcagttcacgtgccgctgccaccatttactctaattggggcaacgactttggctgggcaattgtcagcacctttgcgtgatcgctttggcatcgtagagcacatgcagtattacactatcgatgagctagaacaaattgttttgcgttcaagtgatgtttttcacacttcaattgcgcctgaggcggcccatgaattggcacgacgctcgcgtggtacacctcgtgttgccaatcgcttacttaagcgggtgcgtgattttgcggaagttaagggagaaaaaacaatttcgctcgagactactgaaggcgcgttaaaacaattgcaggttgacgatgagggacttgatcagacagaccgcagattattgagaacgatgatcgaaggatataatggtggtcctgttggtattcggactttggcagctaatgttggtgaagatatggaaacgattgagtcactatatgagccatatttgttgcagcatggttttattttactcacgccgcgtggcagaatggtgacggataaagcatatttacagttaggattaccaattccaggtgataaatagtcccattttctgtataatggttataatatctagaaaataattttaatgaggtggaaattttgaacattttatttttagcaaatgccggtgctgcagcaagtagcaactggatgatgatcggtttatttattattttgatcgctttcacttactttggtatgattcgtcctcaaaagaagcaacaacaacaaagaatgcaaatgatggacaaattgaagaagggtgacgaagtcatcttagttgatggtttgcatggtaaggttgacaagatcaacagtgataagactatcgtggttgatgcagatggcatttacttaacttttgaaagaatggctgtccgtcgtgtgattccagttgctgcaccagcaactcctgcagctgaaactaaggctgaagctccagcagaaaagccgaaagaaaaagcagacgaaactaaaaaagaggataagtaatcatattacttaagagcgtcattttaggcgctttttgttttgctaaaaaaatccttgttgtaaaatagaagtgataattttagttcaaagaaagggatctgaaatgaagaatattcccgttgtaatgattctttttggtggtagtggtgatttggctcaccgcaagctttatccagctttgtttaatttgtatgaacaaggcttaattcacgacaactttgcagtaattggaactgctcgtcgtccttggtcacatgagtatttgcgtgagcaggttagtgatgctattcatgaaacgcacgatactgttgatgaaaatgagttgaaagcttttgcaagtcatttttattatcaatcacatgatgtaactaatgtggaacactatgagattttgaaaaacttggcacaagagctcgatgatcgttatagtgcacaaggcaatcgtctcttctacatggctatggcaccaagattctttggcacaatagcaacgcatattaatgaccaagacttgactggtagtggctttaatcgaattgtagttgaaaagccatttggtcatgatttggcttcagcagaggaattaaataagcaaatcacggcttcatttgatgaaaatgatatttttagaattgaccactatttaggtaaagaaatggttcaaaatatcatgccaatgcgttttactaacccaatggttcaaaatatttggtgcagcaagtatattaagaatatccaagttaccttggcagaacgtcttggcgtggaagcacgtggaggttactatgatacttcaggtgctttgcgtgatatggtacaaaaccatatttttcaaattattactctgctagcaatgccagaacctaaggatctttcttctgctagtgttcaccaagccaagcaagatttgcttaagagtttaattattcctacgccagatgatgtcaagaaatactttgttcgtggtcaatatttgggtagtgatactacttttgcttataagcaagagccaaatgttgatccagagtcaactactgaaaccttcgttgcaggtaaagttaagtttaatgagggaccaattgctggcgtaccaatttactttagaacgggtaaggaatttaaagaaaagaagaaccggattgacattgttttaaagcatattaataatccatatgggcaagctcattctaacaatattacgatcgtgattgacccaactagtgaaatttactttactattaatggcaaacgaattgaccaaccaggaattcgccgtgaaaacttaacttatgaattttcaaaagccgaaatggctaaggtacctgatggttatgaaagattgcttcatgatgtttttgtcaatgattcaactaactttacgcactggagcgaattgaagcgttattgggaatttatcgatgcagttgaagatgcttggcagaaggaaaatgaagcaggcaatccagccattgcacaatatttgccatacagaatggggccaaaggaagctaatacaatctttgagtcaccaactgaacattggatttatgaataaagaaaatttattaccgcaaaatgacatccatcgtcggattattcatctggacatggatgctttttatgcttcggttgaaatgcgggagcatcccgaatggaaaaataaggcattgattgttgggcaagatccacgacaaaatggtggacatggagtagtggctacttgcaattatgtagctcgtaagtatggcgttcattcagctatggccgcaattcaagcagtacgtttggttcccaaggagctaatagtttttactagaccacgatttgataaatatcgtgcagtgtcagctaaaatccattcttttatgcatgatgtgacagatcaggttgaatcagtggctttagatgaagcttatctagacgtgacacatccaaagatagagcaggagtctgcagttcaaattgctttagatttacagaaaaggattcggcaagaagtaggcttaaactcgtcttttggcgtttcctataataagtttttagctaaaatgggatcagaatacgccaaaccgtttggtcgaaccgtaattttgcctagtgaagtgcagaactttttagcaatgcaaaagattgagaagtttcctggtattggaccgaagacgcaagaagagctgcatcagatgggtgtttatactggggcagatttacaaaaaattgaggttttaaccttaattaaaaaatttaagaaaatggggtatattttagcccaacatgcacgtggaatagatttaagacctgttgttacagactcagaggctaatcgaaaatcaattggcatggagcggacttacgagcctgcaatttatactgaggatgaagccctaaccaatattcgtaactattgcaatcatttggaagcagcattaaaaaaacgcaattttaaggcaggtactgttgttattaaagtaagaaataataattttgatacggtaaccaagagaaaaaagttgaaaacaccttctgatagtcacttagatttttatgatgtggctcgtgacttgttcgaagcaacaagttcctttttagatgatggaattcgtttattgggagtcactgtaactgactttgaaaagaaaaaatatcaatcaatcagtttgttcgactaataaataaagctatttttctggtaaactagatacagatatttttacaagatgaggagattaaaaatgagtagttttgatgacatttatgaaaaaatcttacaatatcctacaattatcttgcaccgccacactagtcctgatccagacgcaattggttcacaagctggtttagctagagcattaatggaaaaattcccggacaagcgcatactttgtgctggggaaaacgatgaaggcgacttagcttggattaaccacatggatcaagtcaaggcaactgattacgaaggtgctttggtaattactactgataccgctaatacaccaagaatttctaataagttgtatgataagggtgactttttaattaagattgaccaccacccagatgttgatccatatgctgatatgagttacgtagatccagatgctccagcagcatgccaaatcattgtagacttcttgaatgaagagggctttaagattaccaaggaagttgcttacccactttatgctggaattgtaggcgataccggtcgtttcatgtatccagaaacttcagagcatacttttaaggtggctgctcaattagcttctactggaattaacattactgaaatcgctcgtaatattgctgatgtaacttttgatgaggcaaaattgcaagccttggcaatggacaagatggaaattgatcccgttggtgcagcttttacaattttgatgcagtcagacttgaagaagttaggtttgactgatgatcaagcaaatgttgctgtatctactccaggacgtattaaagatgtgcttgcttggaatgtttttgttgaaaaaccagatggtactttccgcgtacattaccgttcaaagggccctgtaatcaatgaattagctgctaagcatgatggtggtggtcatgcattagctagtggtgctaacgctaaggatatggacgaagtaaagcaggtatttgcggaagtcgttgaagtaactaagaagtttaaagaagatcatgaataatatttttatagattcaagaattaaaccagctattcaggctggtttaaagaagatccattttgaaaagccaactaaggtgcaggagaaagttattcctgctatgttgtctgacttgagtgtagtagtgcaagcagcaactggttcaggaaaaacgcatgcttatttagtaccaatttttaatgaaattgaagaagataaacgctatgttcaagcaatcgttactttgcctagtcgtgaattagccgatcagctttatcaagtagcacggcagctccgtgatgcggcagggatgcatttttcaattgcacatcttgcgggcggaactgatcgtgaacgtcaattagaaaagtatcaaaataatactccacaattggtgattgcaactccaggacgtttgttagactttgttcaaaagaaggtttttgcagttgatcaagtaaaaacttttgttatcgacgaagctgacatgaccttggacatgggctttttgaacgacattgatcaagttgctgctaaattgccgaaggatgtccaaattgctgccttttcagcaactattccagttaaattgtctaactttttacgcaaatatatggctcatcctgatgagatcgttattgataatcctagtgttattgcgccaacgattaaaaacgatttgcttgatattggctcaaaggatcgcaagaatgtcttgtacaaattgttaactatgggacaaccatatttggcgttggtttttgctaacactaagcaaaaggtcgatgagttgactaattatttgcaagatcagggtttgaaggtagctaaaattcacggtggggtaactgaacgtgaaagaaagcgcactctgcgtcaggttgagcaaggacagtatcaatatgtggtagctagtgacctagctgctcgtggcttagatattgatggtgttagtctggttgtcaattatgaaataccacgtgatattgagttcgtgattcaccggattggccggacggggcgtaatggcttatctggtcatgcgataactttaattcgtgaagaagaaatgaaccgaattgaagaattggaaaagatgggtgttcattttgacttcgttgaaattaaaaatggtgaattagtgccacgtaaacactatcgcagtcgtgaaaatcgtcaaagcaagaatcgtaagcttgataccaagctggtgggttacgttaaaaaagagaagagaaagcgtaagccaggttacaagaagaagattaagcgtgcgattcaagaggataatcgtcaaaaacgtaagttggaacagcgtcatgaggttcgtaaggcaaaacgtttgagaaagcgcaagcgtgaacaagggctttgacagaagcggattttgtagtacaattatttcagcttaagatatgttttttgatcaattatttcaaagagagagccagttagatgagaatggcttaataatagtcaaaaaatgctcctttaagtttcataattaagaatatcaagaggtaacaaacactgttgcaatcaaggtggtaccgcgcgtggagcgtccttgaagaaagcaatagtgttttttatttatttttagggagatttattttaatgaagaaactaaatagttcagagtttcgccaaatgtttttagacttcttcaaggatcatggtcacatgattatgccaagtgcatcattaatcccacaagatgacccaactcttctttggattaactcaggtgttgctaccatgaagaagtactttgatggctcagttgtaccaaagaatcacagaattacttcatctcaaaagtcaatcagaaccaacgatattgaaaatgttggtaagactgcacgtcaccaaactttctttgaaatgcttggtaacttctcagttggtgactactttagagatgaagctattccttgggcatgggaattcttaactagtcctgattggcttggcttgccaaaggaaaagctttactgtactgtttatccaaaagatgaagactcatttaatgtttgggtaaaggcagggatgccagctgatcatattgttaagttggaagataacttctgggatattggtgaaggtccatgtggtcctgatactgaaatcttctacgaccgtggtcaagaaaacaacgacgttgctgaagacgatccagaaaacttccctggtggtgaaaatgcacgttaccttgaaatttggaacatcgtattttcacaatacaaccacttgccaaatggtaagtatgttgatcaaccacacaagaacatcgatactggtatgggtcttgaacgtgtactttcaattttgcaagatgcaccaactaacttcgaaactgacttgttcttgccaatcattcatactactgaagaaatgactccaggtaagaagtacggtgaaaacaaagaagacactactgcatttaagattattgccgatcacgttcgtgccataagctttgctattgctgacggtgctcttccatcaaactcaggtcgtggttacgttttacgtcgtttgatccgtcgtgctgacttgaacggtcaacgtttgggcatcaagggtgctttcctttacaagcttgttccagttgtaggtaagattatggaaagtcactacccagaagtaatggaccaacgtggctttatcgaaaacgtaatccaaaacgaagaagaaagattccaatcaactcttgatactggtttgactttgcttgatgacttgattgacaaggctaagaagtcaaaggacaagactatctcaggtaaagatgccttcaagatgttcgatacttacggcttcccatatgaattgacttttgaatcagcacaagatgctggccttaaggttgacaagaagggctttgacgcagaaatggctgctcaaaaagagcgtgcacgtaaagctcgtggtgaccttcaatcaatgggacgtcaagatgtaactttaatgaacattaaggataagtcagtctttgaacgtgatacttacgaagaaccacatgcaaagctagttgacattgttgttgatgataagttggttgataaggccgatggcgaacatgctactttagtctttgacaagactccattttacgcagaacgtggtggtcaagttgctgatcatggtaagatttataaccaaaatggcgaattagtagctgaagttactgacgtccaacacgcacctaacgaccaaaacttacactttgttgaccttattttgccagttgaaaagggtcaagaatacgtattgaagttagataaggaacgtcgtgaagggttacgtcactctcactcagcaactcaccttcttcacgctgctcttcgtcaagtcttaggtgaacacactcaccaagctggttcattagttgatcctgactacttaagatttgactttactgcaatggaaccaatgaccaagcgtgagcttaagaccgttgaagaattggttaaccaaaagatttgggaagctattcaagttaagactactatcactacccctgaagagggtgaaaagatgggtgctttagccctctttgatagcaagtatggtgataaggttcgtgttgttcaaatgggtgacttctcaagtgaattctgtggtggtactcacgtggacaatactaaccaaattggaatcttcaagattacttcagaatcagctgtcggtgctggtatgcgtagaattgaagctgtaacttctaagaaggcttatgaatacttggcaaaccgttcagacttacttgatgatattcaagaagaagttaaggcaaccaagccagataacattgtcgataagattgattcacttgaaagtgatttgcacgatgctcaaaagcaagttgaaactttgaacaagaagatcaatgctgctaaggctggtcaaatctttaatgacgttaaacaagctggtgacttgactgtcattgctgctactgcagatgttaacgggatgaatgacttgcgtgaacttgctgataactggaagagcggcaacaagtctgatgttttagttttagctgctgaaaatgctggcaaggctaatatgattattgccttaggccaaaaggcattagacaagggccttaaagcaggtaacttaatcaagatcgctgccccaatctttggaggtggcggtggcggccgtccaaacatggctcaagccggtggtaagaatccagcaggcttgaatgatgctattaaggcagttattgacgaaatttctaagaactaagaattaattaattgtgtttaagctttttttcaagtaaaattgttgacaggaggaataaatatgagttcgctagataagactatgcattttgactttaatcagaacaaaggaaaaaatgtttatgatactctgcaagatgtttacaatgcgcttgaagaaaagggctataatcctattaaccagattgtaggttacttactttctggcgatcctgcttatattccacggcataacgatgcccgtaatttgattcttaagcacgaacgtgacgagattattgaagaacttgttaagagttatcttggtaagaataaataatgcgtttattaggtttagatgtaggttctaaaactgtgggagtagcaattagcgatgagctaggaattactgcccagaagttggagactatccagattgatgaaagcagatataactttggtatgcgtccattgaagaagctagtcagacaatatgaagttgacggtttcgtattaggtttacctaagaatatggatggtacttctggtagttccgtagctagaagtaaggcatacggcaaacgactagaggaaaagtttggtttacctgtacattattctgatgagagattgacaacaattgaatcacgacgagtacttgttgaggatgcagggatccatgatcgcaagaagcgtaaacaagtaattgatcagatggcagcggtgctcatcttgcaaaattatttagatttacaccgaaaggattaaaatggcagcacaagttaatggtgacgatcaagatcgtcaaattactttgattgatgatcaaggtaatgaagaattgtatgagatattatttacttttcattcagatgattatgacaaatcttacgtgcttctttatccagccgctgttggcgatgatgaagatattgaggtgcaagctttcagttatgatgccgatgatgccggcgatgtaacaagtagcgatttgcatgagattgaatctgatgatgagtgggacatggtccagggagttttaaatactttcttagatgatgaccgcttgagtggtaaataataaaaagaggactggctgtggctggtcctttttgttagttttagaaaaaagataaaaatgaacaagaaaatattagagattttagaatttggcgaaattactaagcgcttgagtaaattagcgattactggtcccgctaaaaaagaagcggaggaattattacctagtggtgattttgaacaagtacaaaatgagttaaagcagactttagctttgactaatttgctacgaattgagggacaacttcctttaacggactttcaggacgtacgtccaagtactaaacgtttaagcatgaaagctaatctaaatgctaaggagttaggcaacttattattggtattaagtttagctcatgaaattaatgatttcttggcagaaatagatccaaataaattggatttgaccgcaatcgatgcaattttagatcaattagatgtgccagatctcttatttagagaattaaagaaatcagttgattatgatggcgaagtattagatacagcttcacatgagcttgctcgtttgcgtcatgatatacgttctaatgaagaggaaattaagaataagatggatgcttatactaagggcaatagtagtaagtatttatctgagcaaattgtgactattcgtgatgaccgctatgttattccagttaagcaagaatatcgggcaaaatttggtggggtagttcatgatcaaagtgccagtggtcaaacactgtttatagagccggaagccgttttaaaccttaataaccgccaacagaatttaattgctcaagaaaaacaagaaattcgtaatattttgaagcacttatctaatttggctcgtgaagaaattactagtttgaataatattgcggctgcattaactggactagatttcttgcaggctaaagccaagttagcaaaagaaatgaaggcaagtgagcctcgtctgacacaagaccattctttgaacttattaaaagcgcgtcacccattgattgacccagaaaaggtagtacctaatgacattcgtttaggtggtgaatttgatactatgctgatcacggggcctaacaccggtggtaagacaattaccttaaaaacagcaggattgcttcaattgatggcacagtctggattatttatcccggctgaagaaggtagcaaggttggcgtctttaagcaagtttatgctgatattggcgatgaacagtcaattgaacaatcgttaagtactttttcatcacatatcaatgacattattgcgatcatgaagaatgttgattctgagaccttagttttaattgatgaaattggtgcagggactgatccagaagagggtgctagtttggcaattagtatcttagactttttgcgtaaaaaagatgctaagatcatggtgacaacgcactatcctgaattgaagctttatggttataatcggccacggacgactaatgcctcaatggaatttgacttaaagaccttgtcgccaacttatcatttgcagattggtattcctggtcatagtaatgcctttgccattgcccgcaagctagggatgcgtgaagatgttgtcaaaaatgcccagaacttaatgtcagatgaagattctgatattaataagatgatcaccaagttgaatacgcaaaccaaggcagctactgtggctcgcaatcgtctgaaaaccagtttggatcggagccaaaaattggagcaaaagttgcaacaagcacttgattggtataaccaacgtgtacaaaaacagcttgattttgcacaagagcgagctaatgaagttgttgccaaacgccgtaaaaaagctgatgagattattgcccaacttgaaaaacaaaagaacatgggcgtcaaggaaaataagattattgaagctaaaggcgaactcaacagtttagagcgtcaggctaataatttggctcataataaggtcttacagcgtgaaaaacgtcgtcaccatgtaagtgtaggcgatcgagtaaaggtcctctcatatggtcagacaggtacgattactaagaagttatctgaacatgaatatgaggttcagatgggaattatcaaagttaaggttagtgatcgcgatattgagaggattgaaaagggcgaaagtactaagcctagacaaactgttagagcaaccagtgcggttagaagaagtaatgctcatagcgagctggatttgcgaggccaacgctatgatgaagcaatgactaatttggaccgatatattgattctgttttactggcaggacttgatacggttacgattattcacggtattggtactggtgcgattagaaaaggtgtttggcaatatctccgcagcagcaatcatgtaaagaactttaattatgcaccagctaatgaaggtggcaatggtgcaacaattgtacaattaaagtaagcgtcttacttgcaaaaagtaagtataatagaatatacttataatataaataaatgaattgaaaaaatgtgaggtaataattatggttgaagcaattaatgatcaaaattttgaagaagaaactaagaatggtgtagcattagtagacttttgggcaacttggtgtggtccatgtaagatgcaatcaccagtaattgatcaattatctgaagaacgtcaagacgttaacttctacaagatggatgttgaccaaaatcaagatacagctaagaatttgggtattatggctattcctactttaatcgtaaagaaggatggcaatattgtagaccgaattactggttacactccaaaggaaaagttaaaccaaattttggatcaatatgctgattaatttaaaaatcaaaaaaagcttgagacgatgttgcctcaagcttttttgatatatcacttattttgatttacttgcttttttagcaagtcacgaatttcttctaaatagtcggcctcagttggaccagcttctttttctttcttgggcattactctatttaaagccttgatcattaaaaataccacaaatgaaatgatcaagaagttaatgacagaattgatgaagctgccatatttaaatgtagcatccccaaccttaaaaacgaggttagaaaaatcaattttgccggcaaagatcccaagtagggggttgatcaagttttttactaaagattgtacgatagcagtgaaggcagcaccgatgattacaccaactgccatgtccattacattgccacgtgaaataaactctttaaattctttaatcatgctctactcctatatctaatatatctaaaaaaatgcgattttaactaaagtatatagtagtggttatttatagtctatcaatttgcttttaaccgaagcgagcgataaattgaactttcttttctttatctaaaatattaatttcacattcggtggttcgaccagttgatttttgaaatgcttccgcgatcattccgccttcaagagagaattccttgctggcgctattcaaacgatcagtgacagtttgaccacttaattcgtaagtagtaaatgatcgtctttctttaactttttctagcttaccaaattcagccatgttgaagaattcaactaaatcatcataatcacttaaatcatattttcgcgcgattctcttgccagcccaataaagaattgaggcgtcatcatcgcctaaaatagttggcaaaaggaaatcgcggtaaagttggttaataaaatatacgtgctcgtttgtgttttctgtgttttctgtcataaacttgttcatcccttttattcttttttattttaccgtaaactagtagaagtagaaaataaatttttgattttaagagggttttattatggataatcgtccgattggattattggattcagggctaggtggcctatctgttgcaaaaaaagtaattgaaaaattgcctaatgaatcaactgtttttattggtgataacgctcatatgccgtatggcgatcgaactaaagaagagattattgaactagttagaaaatcagtccaatttttgttagagaaaaatgttaagctgataatttttgcctgcaatactgcgacagcaatggctatgagtacgattcaagcagaaatcgatccacaaattatcggagttattcagtcgggaagtttggccgcttcacggacaactaagaataaaaaagttgcggtagtttcaactaaagcaacagcagaatcacatgcttatgctaaagagatccgtttccgtgatccagaaattcaggtaacggaattagctgcccctaaacttgcaccacttgtggaggctcaaaaagatcatgaaaccaacttaaaagtagttaaagagagtttgacccccttacaaggaaaagactttgacactttaattatgggctgtacgcattatccattgattcagaaagaatttaaagaagcaattaatgataaaaatgttactatcttggatcctgcagatcaagttgcacagtatacgtttaatgtgatgcggcgcgatggtttgtttagtgatggtaatgaaaaagtcagtcatgaatattacactacaggcgatccaactagttttgatcatttagcaaggacattcatggatgatgcaactttaacatctaagcatgtggatacggagaatgaataatggttaaagaaattttatttgcgactggtaatcaaggtaaagcaaaagaactaaaagaagcctttaaacaagctggggtaaatgtcgagattaagacgaatgctgacttagacaatccgcctcatccgattgaaagtggccatacgtttgaagctaatgccaagattaaggcccatgagttagctaactttagcaagttgccaacgattgcagatgattcgggcttaatagttgatgccttaaatggggagcctggtgttagaagtgcacggtatgcaggcgaagctcacaatgacgcaaagaacaacgccaagttattagctgaattaggcggtgtaccggatgaaaaaagaacggctaaattttggactacgattgtagtttcgatgccaggtgaatttgataaagacttggttgtgtcaggtacttgcagtggtcgtattttggccgccccatgtggtgaagatggttttggctatgatccattgttttatattccggaaaaagaaaaaacttttgcacagatgactactgatgaaaagaatgagctttctcatcgtggtaatgcagtgcgaaaattgctccaagaattgccagcttggttagaacaatttgattagataaataagcttcaaggtcataatgacttttgaagcttatttgatagttaaccaaaatatttgttagtgtaagttattaagaaattgtattagaaatggatgcatgggaattactaaaccaccaccaatgagcgtagttaatacaatttttttaacaaatttaaaaatcataatacaggagtcctttctatgaataaaaaagataacgtatatggacaaaaatataagaaattgcgagtactacatcatattagtttagtgaatgcagctaagaatgtaacaaataaatctacattagcagaatgggaaaaaggtaaagataatttatcttggtgtaaagtaatacaacttctttttaatattcatattcaaccaatagaatttttagaggatagtgtatcttcacaattgtacagtgcgataacaaatattgctgttgcatatcgaaggaatgatatgcaacaattgataataatttttaaagaaaatctgaaaaaatatgaaggagataccaaaagcaaagattatatgtttcaagctgctattgctgcaaatttttatgaagatttatcagagcataatgtatgtccttcaattttaaaagataaaattattttatatttttcaaatataattgataataaaaatttttggtgttatgaagatatattttattttgggttaattacgcagttattagatgcaagacatttacacggcttttctttgaaattattagaatatattgaaaagaaccctattgattctaaagtgtggaatgaattagcaataaacgctttattaaatgctgacttttctttaatgaaaaaagatttaaaaaaagccgaagaattatacaatagattggatatattggaagctatagataattatgctgaattaatcattcgtaagaaatttttagaaagcttgattcagtatttaaaaaataatagcaatgtagagatcttttttttatttcgttgcctagattttttagatttaactaatatgaaattagatttcgaatctgcattcctacaaattaaaaagatttataacaaatgatcatcttctttcagttgaattcattaggcatgatagcattttctaagatagcaaataaatcaatttccgataattcggaaatttatcatatagcagttaaagaaagagcaataataaatttgtaaaaactataaagaaaaatttaaaaagtgtgattattatgtttttacctaaaaagattatagtatcaagcttaatgatggctactttagttggatttagtagtttagcagtggataacgaatcagtatcggcaactagctatgataatggtacacaagaaaatattgaggaacttatcccaacagctcatcatttatttacagaagcggagataaatagtttttcagagctaataacagtaaaaaatggtgaataccaagtagatcaaaatagagcaaatcaggtaagtttaaggaaagtacagttggcaaatcaatttgtaagtcaggttaacgagactaaaagagatttaagattgtatggtgtagatttagcccatccacatcataattactttacgtataaggactttagttggggaactagatattatttttcaactaatgctgctgtaacacggatgcaaaaggttttaagaaatggtaatgcagttatgggtggcgcaagtatagtaggtggagccattggtggggtaattcctgcattagcaggttcagttgtagcaaatcacttttcaaatatggctgctgatttaggagactataataatgcacatagaaataaacaaatttatatggatgtaaattggacgggaggctattcatttcatatttggcattagtttggaggtgaagatatggcactaatatcaatagctgttttagcattaatagtgatgatcataacgtgtttgccagttactcagaggtatttttacaaatatcttgggaaaatcggatattggagtcttttgattatttttattatttttattatttatcttttaattgatatttggctctggttgagaagaccatataagaccgcagatttttggttaacatttagcagtatcaatattgcgggaattgttgctcttgttaaaacttattttgatattaaaaaattgaagtaaaaaataatcctattaaatcattaaaagtttgatttaataggattttattttgagttaaaagctaaaattttaagtgctgcttttggcaatagtttttgctggcaaactagtatctgcgaattcaatcttatttttttgcaaaatttcaatatatttacttagatacaaatttctcacagcagattgtttaccaggcttaacttgaaaatgaatggaataaacaaattttttccctgtttgttcggtcacaccgacaatagtaggacctgatacaattgtctttttctcaggctggatcttacgattgcattctttgattaacttgttaacttcatcaatatcgtttttggtatcaagatccaaattaatgtctagtgctacaccgccatgggctaggttttgcacaatggtaatgttgcggttagggatgaaaataattgagccatctgaacccttgagacgagtagttctgaggcctagttgcacgacggtaccaacattagtgccaatctgaactaaatctccaacatcaaattggtcttcacttagaataaagaaaccgttgaccaaatcactaacaaagccttgtgcgcccattcctaaagctagggaaaaaattccagcactggctaacaaggtgccaactggtacacctagaatagagagaataccgaataaatagaagaagataagggtatattgaaaaacgctgttgatcaaagcggtaatcgttcgcgttcgtttatttttaaccgtgttatgcttggctaagtaattattaattattttatgaccaaaatgggataaaaggtaaaaaatgagtgaagtaatagctaattgccaaataattgacaataaattttggctaattttactccaatcaatttcaattttctgtatatttatgtgagtaggaatcttcatttggtgtcctttctattgcttacgggtataattaagaataacaagacattaattgagaataaaggatattcatgctaaactttttttagatgttgatggaggtagaaaatgacaatttcttatggtgctttagcaggcttaattgcggcgattgcattcttaattttagtattatttacgattccaatgctaattcggaccgcgaagttgttgaaagaaactagtgcaactattcaaacaactaacgagtcaatgaagaaaatttctgaagatatggatggcttgatggatcaaacttcggatttgttagataaaactaatgacctaatgaccgatgttaatggtaaaatgaagacgttagatccagttgttaaagctgctgcagatttaggcgaaagcgtatcagaattaaacgattcatctaaaaagatcgctaaacgctttagcagcaatcatttaagccgtacgggtcttatttcttcaatagctgcgacggcatttgcaagacgcaagcgtcgcagaggtgaaaattaataaaggaggaattcaccatgaaaaaattcgcaagtttcttattaggtgccgttgcaggatgtgcagcaggttttctcgcaggttcacttcttgttagtgatgaacaagttgatgacgttaagaacaagattaaagataatgacaagcttcaagatttgaagaagaaatacgataatggtactgaaatcgtcaagaatcaattagcatcattccctaagaatgttgaagatgattcagaattgaaggattttgacgacatcgtaatcgatgactcaaataaagatgacgatgacagtgaaaatgctgaagagtcagttaacgatttgaacaatgctgaaaaagatgatactgatgcagcatctacttcagaaaaaccacaagcttaattaaagtcaaaaagaaaaggagctggtcgtgatacaatcccactaaagtggacgatttaaatacataaagtattcaattatccatggaggtgggattttttatgtccagaaaaagtaaatattcattcgatcaaaagatatgggcagttgaacaatacttgaatggtaataggagcagcgttgaaatagctaaacggcttaagatgccaagtaaaagtggagcgatgcaagtaagaagatgggttcatcaatatcaaagcaatcgtgatacccttctaagtaatgctcaatacaataatcattactctaaggcatttaaagaaaaggttgttcaagaatatttagctggcaaaatgtcgttaccttctttagctaataaatatggcattagaagcaatggaacagtatcagaatgggtttccaagtataatagtcatatagaaaatcgggactatgatccccatccggaggtctatatgactaaagcaagaagaaaaactacccagcaagaaagaattcagattgttcaatactgtcttaatcacgacaagaattacactcaaacagctgtcaaatttgattgttcttaccagcaggtttacagctggacacacaaatatctagctaatggtgaaacaggattaacagataaacgaggcagacataagaagccagaagagctaactgagttagaactggctaatcgaaaaattaaggaattagagcgtcagctcaaagaagaacaaactaagaacgaattcctaaaaaaattagatcagttagaaaggatgtgcttgccggacaaccaagatacagacaagccgcaataaaaagacgctggaaacaagaaacatatcagttaatccatgactgccatcaaaagtacaattggaagattgatttaatgtgcaaatgggctaaaatagcacgctcagcttattacaaatactttgatcctaagcgcaagccgagtaagcgtgaagaacgagacaaaaagattgaagcaaagatcattgaaataaccaagtctaacaacagtctgtttgggacggaaaagatgaccatggcagttaatcgacagatgtctgatgaaaagccggtttatcataaaactgtttaccgcttgatgtgtatcaatggcattagatcacaaaagcctagataccagaagctaaagttcaagcatacaacgcctgagaaaacggccgaaaacaagttaaaaagagactttaatgcatctagacctaatgaaaaatggtgtacagatatcactgaagtcgttgctgctaacctgcctaaggcatatctatgtactgtgtttgatctatatgatcgctatcctgttggctacgcaattagtaaacgaaacgatactgctttagttcaagcagcctataagcaggctgttaaagcataccctaatgctcatccgcttttccatagtgatcgtggttttcaatttactcgcgcacctttccaaaaccaattagaagaccaaggcatgacgcaatcaatgtctcgtgttggctgctgtattgataatggtccaatggaaggctggcaaggcattatcaaagaaatgcgagttattcttcatcctcaagtggccagttatgatgaacttaatgattctatttgtaagacaatagattactacattaatgaagatccacagaaacgttttaacggtttaactgctggtgaaatgcgcaaagaagcgatgaaaggcaatattaagaattgccctattgcaccaaatcatcgaattgagaaatactggcaaaaaatacacgaaaagaaaataagagaagccaaaaaatcctcagctgattattaatcaactgaggaataaaagctttatgtaattctactgtctacttgacagggaatgtatcatcgtgatgatcagctccttttttatgacaaaattagtctttaagtggcaaaacttttaagtccttgtcagtgtgagtaaaggtttcaaagccgtccttagtaacgacaccacaatcttcaattctgacaccagcaaagccagggatgtagatacctggttcaatggagaagcacattccttcttcaagaactaagtcgttaccttgtacgattgatggatattcatgaacgtttttaccaatgccgtgacctaggcggtgaatgaagtattcaccatagccagccttagtaatgatgtcacgagccacgctatctaattcttcagcggtgattcctggcttagcagcttcgattgcggcttgttgagcttcacgatcaacttcataaatttcgcgttgcttagcagtaggttcaccgtaagcaacagttcgactagaatctgatgcgtaaccatcgtgcatggtacctaagtcgaataaaactaattcatttggttgaacagtgttcatagttggaccaaggtgaggattagcggcgtttttaccagcttgtacgatggtttcaaaactttcatgcataacacctttttgaatttttagttggtaatcaatttgtccagcgatgcttctttcggtgacgccagttctaattgcgtcaaagccaatcttaaaagcgaagtctgcttctgcaccagcgccttgcaacttcttgatttcttcaggtgtcttgtaaagacgaagtttttcaataaaaggtgaaacatcgttagtgaaactagcgttaggaaattcaccacgtaagagctggtagtgggcaacagacaaatcatctttttcaattgcccaattatgggtatcgtgagttctctttttgacattagttgcgatgatgttccaaggattttcggaatcaaggtagccaataacgtcgccatcccatgcggaagcttttgcttcttctacgtttaaagctggacagaaaataaatggttccgcatcttttaaaacaattaaagcaaagattctctcatgtggttccattgagtaaccagtaaagtaggaaatggtgattggattagaaatgtaagcaagatcattattggagtcttgcaaccattgttgtaatttatctaagttcatattgtcctcttttcttgcaaattatgttgactgtagtatatcatgatttcttaatgaaaaaatgaaagaaaatctgtaaacgtttgtattttatgcagcgtcgtgatatctttaagtgaagaattttttggaaggactgagagataagagatgcataaacaagaagttacaatctatgacgtcgctcgagaagctaaggtttcaatggctacggtttctcgtgttgtgaatggtaatagtaatgttagaaaagagacacgtgaccgtgttctcgaagttattaaaagactgcactatcaaccaaacgctgtagctcaaggtttagcttctaagcggactactacagtagggttaattgtcccagatttaactaatttatactttgcagaattatctaagggtattgatgatattgcacttttatataaatacaacatcattattactagtattgaaaaccgcttgatgaaggaagaccaagttattcaaagtttgctgaataagcaagttgacggtgtaatttatatgtctaaccgtttatcagatgcagcagctgatgcctttaagcggactgatactcctgtggttttagcaggtactaaagacaatcgtgatgattttgcttctgtcacaattgactataagaaggctgatactgaagcattaaatttgatgtaccatgatggtaagaagcatttgggaatcgtagttggtgatcaagatgctgtagttaacagcgaaaacagaatccctgcttatgaagaattcatggaagaaaatgatttgggcactcctcgaatctatactgatattaaagactattcagatggttataatttatacccacaattagttaaagatggcgttgatggtgtaattgttactcgcgatatttcatcagttggtattttgaattctgcgatggatgcaggtaagaaagtgccagaagatttggaaatcgtgaccgccagtgctacgcagttagcttctgttgttcgtccagctttgactacgattaagcagccactttatgatatgggtgccgtagcaatgagaatgttgactaagttgatgaacaatgaagaagtagatgatactcatattgttttgccatatgaattagttaaaaagcaaagtactttaaatcaataattaagtgaagcaaaaaagaccagtttactggtctttttgttttagtagataattttgttaatctgttgaagcttttgtgtaaaagtggttggtgcaattgcttgattaggattatagggcaaaagcacgagattagtgtactgactgacccgtggtaaggactgataatctctgaaatcgtcttgactaaagaagccatagaacaagatatcttttgccttaacccaacctagtttggtataaatccacatgtttttaggactaccattaaaattttgaatttttaataattgatttgcgggtaatttttgctgcgttttggcttggttatcaggataacgataaattgtaactttttggttaggtttagcgataattttcttattttgataaggagcaatatctcgctttgttaagtcaaaattaacgaattctgccgaaataaaagttttttcagcaatttgataaaataagcgatcatctacacggacgccataagtgacattgactttttgacctggttgcacgtacttcttttctttgatgcgaacatacggattcatcattgtagcggctttagttttaccaaaataaattccagttctattaatagcgtactttttagtgccacttttggctaatttatatttaaaaccagtagcgggatagttggtaaccacgccatcaacattccgattaattagccaatgccatagggcaggcgattcgtccatttcggcccagacaaacagttgcttatgtaatttgtgaagccagtgaattaaaaagggatgctcttgcacaatgtcagaagaagcattgatagcattaacttgaggtaaattactgaaattaatgcgtttcaggctaccaacgatcaaaattagataagcttcaggcataatttttctaaagtgaaagagactagcagcggaaaatgaatgaatcatgattcttttctgcatatggtattttttaactatttgtgcgattttatcctctaactcataggacggatttaatccatgatcaattttagtctctaagacaaatttagtgtttggtttattttgataatgcttaaaaagctcactgagtgacataacgtgttcgccattgtcatattgcagttgtttaagtgctgtaaaattattttgtgatacaattgcatgtgtatgagtaactcggaagaggtcatcatcatgtgcaatgaccggaactccatcctttgagagctggagatcgagttcaacgtaatcagcaccagaattaaaggcggaatcgtcagcctgaattgtttcttcaggatatttgatgggatcaccacggtgccctacaactgtaaaaccactatttatgaaaaagactaagctaaaaaaaagaacccaaacgagtcggcttttaaatttcatgtgtacacctctatcgcatacttaacaatagcatggttacacatttttttctatttatagtactattcttttatcagtaatcggtatgattgaaatctaaaggatgagatttaatggaacaattggacttaattgaagaagttaccagaaatgatggcagtcgatattatgaaatctctaatattgaccaaaatggaattgcagaattagctgcagatcatggcttaattaaaaaagtcaaaatactgcagctgaatattcctcgaactaaggcactgattgcttatgaaaaatatatcaatgatacttatgacttgcagactttgactaatgaaagtgattggaaaaatccaaaatgggtagaatgggataaacctaagggaaaaattttagacgcatataatatgatcttaaaagccaatcgaattggttagaaagtggcataaaaaatggaacaactgcgaattttacataccaatgatcttcattcacattttgaacatttccctaaaatcggacgttacttgaaaaaagcgcaggctgatcaatcggttgatggtatctacacttttgatgcaggagactttatggatcggtctcatcctttaactgatgctacggaaggtcaagccaacatcaaattgatgaatgggtttaactatgatgcaattacgattggcaataatgagggaatttctaatccacattgggtattggaacatttatttgatcatgaggactttccgacagttttagcaaatttgcgtgaagaagatgaatcaatgcctaaatgggcagtcggccatatgtttttaactactaagaaaaagacgcgaattgctttaattggcctgactgcagcttatccaatgacttatggtcctaatcattggcatgtcaagatgctaggtgacagtatggatcacgaattagctcaaattgaaggaaagtatgatgtcttaattttattgactcatgttggattaaaaatggatcgctggttagcgaaacattatcctcaaattaatttaattgtaggaggccacagccatgatctgattgaacatggtgaaaaagtggggcatacttggattacgcaaacaggtaaatggggaaactatgtgggtgatattcatctagaacttgaagatcatcacgtgattaaggtagtacctcgcactatttctactgcttcgatgccagaagaaccggaagataaggcagtgattcagggctactatgatgaaggtaagcgacttttatcagaacgaaaagtggctaatttacctgaaaaatttgcggatgataaagtagcagccgttcaagtttctcttgatgcgattgctgattttgctaaaacagatttagccattttaagctcaggcctattcttgaccccgtttaagagtggaataattactcaatatgatttacaaaatgccttaccgcatccaatgcacgttgttcgttcaaccttgaaaggttatgatttgtggcgactagtgatggaaattgaaaagaatcggcattacctagaccattttccactgcaagggatgagttttcgaggaaaaatttttggtcagatgtattacaaagggatcaaggttgatatgcgtagacgtgtagtttacgtcaatgggcatgaaattgatccacaaaaagaatataaaattgcctgtttggatcattatgtcttagttccatttttcccaactttggctattgtcggtgaaaatgagtttttattcccacaatttttacgtgaagttgttggtaaatatttggctgaaaaatatcctttaacagcgagaagtgaaaaagatgactgaagaaaataaatttgaacaagaacagccaattagacacccacttgctgacgtggggcaagatggtaagagcattaagattggtgcgcagctttatagcatcattgtcaatgagcgagacgcacttgatttagaatctttgcgtaaaaaatatgatccttatcttgaccagtatgattatctggtgggggacgtttctagtgaacatttacgcttgaaaggcttttataaagacggtgctagaaccgcaattgataaaaaagaaatggcgatcgtggattatttaacggaatattgtaatcccggcggaccttattttatcttggaattaacgcatccagtacattattatcagcatcaacgtactaaaatacggcgatcacgtgaacgacgcgagcgcgattttggtaaaaatgagcgttatcatgcacgacgtcgaaattatcggaagaataaaaatgaaaataatccgtttaagaagcggcgtgttcatcaaactaaatttaagaaaaaacaatcaattgcagtgaaaaaagaatttggacggcatcattcatttattattaaaaagagaaagggaaactagtgaaagattaccgggtatttttaattgacttagacggaactgtttatcgtggtaaggaaacagttgaatcaggagtaagatttgttcatcgtttggttcaagcagggaaagactatttgtttttaaccaacaatacgaccagaacaccgcaaatggtagttgataaactaaagggacacggtatcgaaactgatacggaccatgtttatacgccaagtatggccacagctagctatattttacaaagagaacacaaggaaaagatcggcttgtatattattgggcagattggtctctggcgtgaattattgcaacatccagagtttgagcttaatgaagaaaatcccgattatgtaattgtcggtatggatacagatctgacttatcataaagtacgagtagcttcacgggcgattagacgtggagccacttttattgggactaatgccgatatgaatttaccagcagaggatgagctaattccaggcaatggttcacaatgtgcattcgttgctgcagcaagtggagtagagccactgtatattggtaagcctgaatcaattattgtaaaaatggctttggataaagttggctatagcaaagatgaggcacttttggtaggtgataattacgataccgatattaaagctggctttaatagtggagtagatcagttgttgactttgacaggtgtgacgaccaaagtggatattgcagataaacgtcaaccaacaattttagttaataacctagatgaatttgaattatgattactaaaaacaatattttttcgctgatttatcattttttgtttgctgtttctagcagtgtaattggggcaattgtggctagttggccattattgtttatttttatgatcgtacaaaagacatatgagacggttcacatgtctttgtttaaggtaatgcataattataaccagctgatgttttatttgctctggccctttaaaaagcagcttaaaatggataatttccctacatctgctaatgcggcagaacattttgcggaatgtaagcatttatttattctgactctattagtttttattatctgcatcatagtgcactttgtttttaaacgacaaaagaaaaagctactgcttaatttggataaatcagtagcccttattttgctattattgccaattattatttttccatttgcagtaaccaatttcgacagtttctttgtgatttttcaccatattttgtttaacaatagtgattggctgtttgatcctaatactgacccaattatcaatgtgctaacggaaggcttctttgcttcttgttttgccgttgctggggttatttatgaattatattttgctgaaaaattattacgtaagtaaaaaagagttccttagtggaactcttttttgagtgatatttttttcttgattgcgacaattgcgattggcacaactgatactaaaatgatagcaattacgatcattgaaaaatggtcctttacaaatggaatattgccaaagaagaaaccgatgattgtgaacaatcctgtccaaagcaagccacccaagatgttgtaggtgataaatttaccataatgcatcttactgccgccggaaatgaatgggacaaaagtacgaataaatggtataaatctacctataacgatcgtaattggtccgtggcgctcaaagaacttttcagcggccaaccgattattttgattaattaatttattgaaccagctatgtttttcaccagctctggttgaccaggcaccaatttcatagttgatactgtcaccgattatggcggcgaatgctactataagataaactagccaaatatttaagccatacttaggattagcagccattgcactcgcagcaaaaatcaacgaatcgcctggaagaaatggaaaaacgactaagcctgtttcaataaaaatgatagcgaataagattaaataggaccaaccaccgaattggttaacaatcgtgattaaatggtcatcaatgtgcaaaataaaatcgattaaactcatctggaactcctaaaaactagttgaatgaattgtcaaagttttttcagggaaaagatcacgcataatcgcggtgattgcaatctgggcttcgccaaaaccgagagcgattaaagggacgcgtccaggataggtaacaacatcgccagctgcataaacaccggcgatattagtttgcattgttgaattcaccttaatttgtgcgccagctaaatcgattccccattttttgacaaagcgattattagctttaaagccatatgcaacgactgcttggtctaacttgatattagttaaactatcttttcccatttcttttaaattaacgttcagttgattatcaaccaaattgatttgtttaggaagatagggagttaaaatttcaacattttttaaagacttaagttttttgacattagattcaagaccgcgaaattgattacggcgatgaatgattttgacattggcataattagctaattctagtgccaggtctaatgctgaatcgccgccaccaaagacgccaactgtttgtccgacaaatttttggggatctttaataaagtaatgaatccttttttgagtatcatcatccatagataatggtaaagctttaggtttaaaggcaccggcaccagtggtaatcaatatgctgcgggatgcaactatatcatcgataataaagccgtctttttgtttagtgacattttcaactttatggttagtaaaaatagttgtatccgttaaattatgtcgtaaattgtcgattagttcagttcctgtaatagagtcgtaagcaggaatatctttgattttcttaaaaggataaagcatttgtggctgtccgcctgtttcagataatgaatcaaacagtacggtcttgagtccatgaagattggcaaatcgcgcggcaaataggccaacaggtccgccaccgataatagttaaatcaaattttttaattttaatgacctcctcaaagtagtgatgtatcaactttaacatgaattttgtaaatattcatttaaaaataagcttgtcaaaaaatgaattttaaggtatattattgaagtcgcctttttaagagcgagcataattctttattaaaaaatacttgcaattaatattcaagtattatatattaataaagtcgcttcgagagatgcgacgagagcttaaaaacagacatgcaaggaaagaaaacaaataaaaagaaaaaagtacttgcaaagaagtaaataagctggtaatatatttaaatgtcgtcaggtgaaagcagaaaaagcttgagtaagacgaaaaaacaaatcaaaaaagttcttgacaaagaaatgatggtttgataaaatataaaagctgtctgctttgcaaaaaaagcaagacagaggtagtactttgaaaactgaacaaagtttcgctaaaagtgtgcgggtgtaaaaacccaaacaagaagcgaagtcaattcgcaagcaataaatttgagacaaagatcttaaataaggaatgagcaatcattcaaactttttaaaatgagagtttgatcctggctcaggacgaacgctggcggcgtgcctaatacatgcaagtcgagcgagcggaactaacagatttacttcggtaatgacgttaggaaagcgagcggcggatgggtgagtaacacgtggggaacctgccccatagtctgggataccacttggaaacaggtgctaataccggataagaaagcagatcgcatgatcagcttttaaaaggcggcgtaagctgtcgctatgggatggccccgcggtgcattagctagttggtaaggtaaaggcttaccaaggcgatgatgcatagccgagttgagagactgatcggccacattgggactgagacacggcccaaactcctacgggaggcagcagtagggaatcttccacaatggacgcaagtctgatggagcaacgccgcgtgagtgaagaaggttttcggatcgtaaagctctgttgttggtgaagaaggatagaggtagtaactggcctttatttgacggtaatcaaccagaaagtcacggctaactacgtgccagcagccgcggtaatacgtaggtggcaagcgttgtccggatttattgggcgtaaagcgagcgcaggcggaagaataagtctgatgtgaaagccctcggcttaaccgaggaactgcatcggaaactgtttttcttgagtgcagaagaggagagtggaactccatgtgtagcggtggaatgcgtagatatatggaagaacaccagtggcgaaggcggctctctggtctgcaactgacgctgaggctcgaaagcatgggtagtgaacaggattagataccctggtagtccatgccgtaaacgatgagtgctaagtgttgggaggtttccgcctctcagtgctgcagctaacgcattaagcactccgcctggggagtacgaccgcaaggttgaaactcaaaggaattgacgggggcccgcacaagcggtggagcatgtggtttaattcgaagcaacgcgaagaaccttaccaggtcttgacatctagtgccatttgtagagatacaaagttcccttcggggacgctaagacaggtggtgcatggctgtcgtcagctcgtgtcgtgagatgttgggttaagtcccgcaacgagcgtaacccttgttattagttgccagcattaagttgggcactctaatgagactgccggtgacaaaccggaggaaggtggggatgacgtcaagtcatcatgccccttatgacctgggctacacacgtgctacaatgggcagtacaacgagaagcgagcctgcgaaggcaagcgaatctctgaaagctgttctcagttcggactgcagtctgcaactcgactgcacgaagctggaatcgctagtaatcgcggatcagcacgccgcggtgaatacgttcccgggccttgtacacaccgcccgtcacaccatgggagtctgcaatgcccaaagccggtggcctaaccttcgggaaggagccgtctaaggcagggcagatgactggggtgaagtcgtaacaaggtagccgtaggagaacctgcggctggatcacctcctttctaaggaagcgaaggatatggagagcaggaatgctaagagaagtatccagagcaagcggaagcacactgagaaactttgtttagttttgagggtagtacctcaaaaagagctagtacattgaaaactgaatataatccaagcaaaaaaccgagacaatcaaagagaacagattgtagagcgaccgagaagagaattcttgagtaaggtcaagtagaaaagggcgcacggtgaatgcctaggcactaacagccgaagaaggacgtgacgaactacgaaaagcttcggggagcggtaagtacgcagtgatccggagatatccgaatgggggaacccaatgcagagatgcattattgattagtgaatagatagctaatcaaaggaagacgcagtgaactgaaacatctaagtagctgcaggaagagaaagaaagatcgatttccttagtagcggcgagcgaagaggaaagagcccaaaccaagtgatttatcatttggggttgtaggactgcgacgtggcagtgtaagagatagttgaattatctgggaaggtaagccagagagggtgagagccccgtaagcgaaatctcaagcacgcctagcagaatcctgagtaggccgggacacgaggaatcccggttgaaaccgcgaggaccatctcgcaaggctaaatactagttagtgaccgatagtgaaccagtaccgtgagggaaaggtgaaaagaaccccggaaggggagtgaaaaagaacctgaaaccgtgtgtctacaagtagtcaaagcacattaaagtgcaatggcgtgccttttgtagaatgaaccggcgagttacgttatctagcgaggttaagtcagaaaagacggagccggagcgaaagcgagtcttaatagggcgaaaagttaggtgacgtagacccgaaaccaagtgacctacccatgaccaggctgaaggtgtggtaaaacgcactggagggccgaacccacgtaagttaaaaattgcggggatgagttgtgggtagcggtgaaattccaaacgaacttggagatagctggttctctccgaaatagctttagggctagcctcgtggagaggataatggaggtagagctctgtttggactaggggcccgtcaggggttactgaatccagataaactacgaattccagatatccatacacgggagtcagactgcgagtgataagatccgtagtcgaaagggaaacagcccagatcaccagttaaggtcccgaaatctatgctaagtggaaaaggatgtggagttgcgtagacaactaggacgttggctcagaagcagccatcattcaaagagtgcgtaatagctcactagtcgagtggcgctgcgccgaaaatttaccggggctaagcatagtaccgaaactgtggatgtgttttaaagagcacgtggtaggagagcgttctaagagcggagaagttgaatcgagaggatcaatggagcgcttagaagtgagaatgccggtatgagtagcgaaagataggtgagaatcctatccgccgaaagactaaggtttcctggggcaggctcgtccgcccagggtaagtcgggacctaaggcaaggccgagaggcgtagtcgatggataacaggtagagattcctgtactgtgtcaaatcgttaagagcgaaggagggacgcaggaggtgaagcacgcatcgcgatggaacgatgttcaagcaacaagtgcggttaagagtcaaatgcttctaaccagcaacacgagttgtgaagaggagtgaattaaaagtagcgaaggtgtggtaatcacactgccaagaaaagcttctagccagagatgacatacccgtaccgcaaaccgacacaggtagtcgagtggagaacactaaggtgagcgagagaactctcgttaaggaactcggcaaaatgaccccgtaacttaggaagaaggggtgctagccaagagattggttagccgcagtgaataggcccaaacaactgtttatcaaaaacacaggtctctgcaaaatcgtaagatgacgtatagaggctgacacctgcccggtgctggaaggttaagaggagagcttagcgtaagcgaaggtttgaattgaagccccagtaaacggcggccgtaactataacggtcctaaggtagcgaaattccttgtcgggtaagttccgacctgcacgaaaggtgtaatgatttgggcactgtctcaacgagagactcggtgaaattataatacccgtgaagatgcgggttacccgcgacaggacggaaagaccccatggagctttactgtagcttgatattgagtatcttttaaacatgtacaggataggtaggagccagagaagataggacgctagtcttattggaggcaatgttgggatactacccttgtttgaaggatgctctaacctcgacctgtaagccaggccagggacagtgtcaggtgggcagtttgactggggcggtcgcctcctaaagtgtaacggaggcgctcaaaggttccctcagaatggttggaaatcattcgcagagtgtaaaggtataagggagcttgactgcgagagagacaactcgagcaggtaggaaactaggacttagtgatctggtggtaccggatggaagggccatcactcaacggataaaagctaccctggggataacaggcttatctcccccaagagttcacatcgacggggaggtttggcacctcgatgtcggctcgtcgcatcctggggctgaagtcggtcccaagggttgggctgttcgcccattaaagcggcacgcgagctgggttcagaacgtcgtgagacagttcggtccctatccgtcgtgggcgtaggaaatttgagaggagctgtccttagtacgagaggaccgggatggacgcaccgctggtgtaccagttgttccgccaggagcatcgctgggtagctatgtgcggaaaggataagcgctgaaagcatctaagtgcgaagcccccctcaagatgagatttcctttgcgtaagcagtaagacacctcagagacgatgaggtagataggctgggagtggaagtcctgtgaaggatggagcggaccagtactaatcagtcgaggacttgaccaaagcgaagcaaactggaaggttttttgcgagaaggattatgtttagttttgagtgtaaaagctcaaaagagtacggtggcgaaagcaagaaggatacacctgttcccatgccgaacacagaagttaagcttcttaacgccgaaagtagttggtgggcaactgcctgcgaggaaaggaagctgccgtgctcaatatggaggattagctcagctgggagagcatctgccttacaagcaggaggtcacaggttcgagccctgtatcctccatatcgagtcgttagctcagttggtagagcaacggacttttaatccgtgggtcgagggttcaagtccctcacggctcatgaccctatatatgcgggtgtggcggaattggcagacgcgctagatttaggttctagtgttttcggacgtgtgggttcaagtcccaccacccgtattgccaaccacatattgacaatatgccgatttagctcagttggtagagcatctgtcttgtaaacagggggtcgtacgttcaagtcgtataatcggcatttatattacgcggaagtagttcagtggtagaacatcaccttgccatggtgggggtcgcgggttcgaatcccgtcttccgctttcatcaacacgccggagtggcggaattggtagacgcacgggacttaaaatcccgcggttggtttcaaccgtatcggttcgactccgatccccggcattgatgatgcgcccttagcgcaactggatagagtgtctgactacgaatcagaaggttgaaggttcaaatccttcagggcgcatataacgggaaatggctcagtttggtagagcacctggtttgggaccagggggtcgcaggttcgaatcctgttttcccgattgtaatctaatggtgattggttacattttggcggtgtagctcagctggctagagcgtccggttcatacccgggaggtcgagggttcgatccccccgccgctataattgtaagcttggacctttagctcagttggttagagcagacggctcataaccgtcctgtcgtaggttcgagtcctacaaggtccataatatggcttttatattaatatcgcgggatggagcagtctggtagctcgtcgggctcataacccgaaggtcgttggttcaaatccagctcccgcaatttggtccattggagcagtggtttatctcgcctccctgtcacggaggagatcatgggttcaaatcccatatggaccgtaagatggctcggtagctcagtcggtagagcaaaggattgaagctccttgtgtcggcggttcgattccgtcccgcgccatttcattttatattaggtgcgggtatagtttagtggtaaaacgaaagccttccaagctttagtcgcgagtccgattctcgttacccgctttatatgggcctatagctcagctggtttagagcgcacgcctgataagcgtgaggtcgatggttcaagtccatttaggcccattggagacatactcaagtggctgaagaggcgcccctgctaagggtgtagatcgggttattccggtgcgagggttcgaatctctctgtctccgtattatgcattttaaagtagctgagagccgcgtggttatgcggttcttttgttttactctcattttttgatagaaatttgatagaaaaagtctttttaaaaaagcccattaatatctttacgaatttcttcctcaccatttttggttgtgtgagtataagtacctagcgttaaatctaggctcttatgtccaagcacatttttaacatctaccatattccaaccattatcattagcaattgtagcaaaactatgacgcaatccatgaaccgtaatctttttaagatttgggttcttttcgtaaatttgctttttccacttgtcagccttactagagcggtaatagtcgcccttagtattgtgaaagacaagtgggtttagatctttacgacagtgaagcgaaatttcatatactaagtctgacataggaacgatgcgggtttcatttcctttagggatttgagtgccataatcgtttgtttctatttctccgttacctttaattttgagcttgtaagctgttgttcgctgaatgtgtatggttttatgcttgtaatcaaaatccgaccagtggagggcaatagcttcgctcttacgaattcctgtggttgcgaggatcaagaagtaaaagtaaacctgatcactaatttctttcgcagtgtctaggaatgattttagctcatcaagcgtatagaagttatgtgatgtatcgcgtcccttaaccgctgacttcttaggcaagagagaagatctggcagggttgcgattaatcaattcaatgtctaccgcgtactctaaaagcttatgcaaatagttaaacaccgtacggtatcttttatactctttagctaatgagtaaaaataatctgatatagttttagtggttagactgtcaacgtaggactcaccgaattcgggcttgatatgcaagttgtataattcgtaagttttctgtgcggttgaaggtttaacgtctaagacatagcgtttaaaccattcgttccatagctgatctacagtatattgcttttgcttaacaaaatcttgaggattggttgcggctagttgcttatatacagcatcagcctcttcatagctcttaaagccacgacgaaaagtttgtactttttgaccattcttttgacccaagtaaatgtaaaacatgtagcgctttttaccgcttttaagcttataaggcttaattgcggtattttttctttttggcatatttttcacctcctttcaataaactaatgttctcgtaatgcgtgaaatataagcccgcttgctcggtagagtaggcgagctattttgtattaagccagactaattaccatttctaacccagttgttcatgctatttcggaaagaatttacgttattttccattgcattgactttgtttgttgaaacgagatcctcaagtgaaagatttttacgttcttggtttaattttctaaatctttgctgtaattcttctttggtaacaaaccaaccgttgtgtcttttaactacaaatctcattcctttagcatagtaaagactaccttttaaaatccaggcgttatgagtagcgggaacaatcttagtcatattgcctttgtgtaaccacagtttacgtacctttcttcctccatatctgtaacaaggtgtgtcctcagttacttttacagtaataacctttgaatttttgagtggcttataagtcacttttttatgttttttagtagctaaaactgtgtttgaagttgtgcttgttgccaaagtgccagtaaaagaactaagagtagcacaaagagctaaagctgtaattaattttttattcattgttcaatctccttaaatcattcctaaaattgaaataataaacataaaaacaataccaattgttaatccgatatcaccacctatcagttgacctactaatgcacccaagaaaataagagcgatagcacaaccacagcccattttttcatcagagtcattacttttggatttattttttgatttgcctaaatctcgactatctatcgtggttctactataaattgcattatgcatgcttcttttaggatcctttatgactccagcgccttttttaccatatcctggtataattttcttttttaattgtcttttatatttcgctgttgttcttgccttgatcgattttgttagagatcgatgtcgtattaatctactcatttttactctaaaccatatttcaataattcttcttgaactaggtaataattatcagtgccaatatattttgcaagattcagccagttagcacttgccacatcattacctaggtcaacgtatttctttatctgttcatggactacaaaggcttttgcaccactctcacatatcaaacgagttgtggcattgtctttgtagtctttttgcgtatcatcatcagcttcagcatgacccagctcatgcaagatgactttttcagtttcttcatctgataggccatctttaacaaagacaaagtcaggacaaggatcaggcatgtggactatatagccttcactctctatgtccttatacacaagcttcaaatgatgctcattaagtaaatcttttatacgatcactcataacgattcaccttactctttgccttgaaaatatccttttaagtaagacttgataattttacggtcatgatcggtcataggcttaccgtcgtaggagtgggcgttgtccaaaagagcatctaagtctgtatcagagatatttgaatcagagtgcgaagagacaccagctaagtaatcaaaactaacatctagcttagtcgctagtttctttaatgtatcaatcgatggctcattccttccaagttcccaccctgagacagtagtagacttaacatttattaattcagctaagtctttttgagtgtaatgtttattaattcgtgcattttttatgcgttcagctaagttcataaaagcctccttacacactttaactaggtttctatacactgagtatagttcttttacacaaaaaaactagaaaattagttaaaaagtattgcaaatacacaaaacgtgtactatacttagcgtgtacttgagataaggcaggtgatataagtgaaatttaccgtcaagcaagcccgcgagtatgctggcttaactcagcaagaaactgctaagcaattaggcgtagcacttgcaacttaccaaggatatgagtggggcgacgtggaaatgcgaattggaatggctaagaaatttgctaaactagtttctattccattagctcaactaattttttactcaaaaactagttgaatcgtgtagtgaaaggagaaaaagatgaatgatttagaattctttgactttgaaaaccagccagtcagaattttaaaaattgaaaatgaaccatggtttgttggcaaagatctaactaatattttgggctacacccatggtgcaagagacattaattctcatgtggcagatgaagacaagctgaagtcccaaattaggactgcaggtcagatgagagaacaaattttagtcaatgaatcaggcttatatagtttgatcttgtctagcaagatgccaaacgctaaaaagttcaagcattgggtcacacatgaagttcttccaactatccgcaaacatggggcttatatgacagatgaaaagattgaagaggtcttaaccgaccccgacacaatcattaagcttgccactcagttgaaagatgagaggcaacagagattaattgaacaacaactaagaaaagatgctgaaaatcaagttcatgaaatgaaacctaaagctttgttcgccgattcagtggcaactagtaaatcaaccattttgattggtgaactggctaagatcttgcgaggcaacggcgtagacattggagcaactcgacttttcaagtggatgcgtgcaaatggctacctgatcagtcgtaaaggcagtgattggaacatgccaacacagagggctatgaacttaggactgttcaagatcaaagaaacaaccatcaatcactcaaatggctctacttcaatcagtaagacgccaaaagtgactggaaaaggtcagcaatacttcgttaacaaattcttaaaaaaacaagctccaaagattgtagctgataagagcggaattaaggctgagtaccaaaacggcaatatcattggcgcaattaattcagatgggtctggatatatcgcataaatggaggtgatagctatggatgacctacagcacggtatttatcgcatggtagcaagggaagtggcaagaactcaaccaaaaagagaaaagaatttccttagcaaaaaggacgctgaaaaactgattaagaagtatacaaggcaatacacacttcaagagttcttgaatgcaactgaagccgcatatgtttgcggtatgagtcagacaaccttttggagattcagacaagaacataacgttcctgtccatgtgattgacggaataaaaagatacaagcgttctgagctgatcgcttgtgtagagaagtatagcgtacgtgggtacgcataggagggcattatgccagatttgggcactactaagcttgatcatgtattgagttatatctgtaagggatttgaaaaaatgttggagttttgcgccattgcatttttaccagcagctgtcatagagcagttgtgtatctatggtgtaacccacccagatcaagtgatctcactgttagttgtgcttatgctgattctttcagcatttgcagtcaaagaagttagaaagatgaaggagaaaaagtgaagctatggcacaagtttatcaaccacatatgggctatcaacgagccggtaagtttagcgaacgccagcttatccttgttgctcactctaatgctattggcgctcttagtggtgctagttttgcggaactgtcagtaaacgttaaagaatttttaggcattaaaaaagccctatgctaggcaaagcactgggcacatttacaaaaaataatacataaggagtatatcacaaaatggacacctatagattaaatgatttaaaagcaaccgttggcatgtttggtgatttcacccactttaaagatgtaatcgactttatttttgaaacaaatcctttcaaaaaggcattagatatttttgactgtgatgacgttggtgacctctcagaagcaatcacaaacgacaaaggtgaatttgatgaggatttagccaaagacctttgtattgactgtttagacggcgaaaacgtggatgatgaagaccccgaagccgaatggggcgatcaaatgtatgacagagcagttggaaagtaggtgctgatcatgcatgatgcacaacgatggctagacggaattatcgaggatatccctaatatccgcaaagaaatgctggacgactgtcgcactatgaagacctatggcaaggcaaaacaatacgctaggcagttccaaattgactttgagggtaattataaggctacggcagaagaacaagcacagagcttatttaacagccttatcgaggacgtagtaacagaacttaatcgagaatccgacagaggagagattaaacatgactgaggcaacaaagctagcagaaatgacaaaagatcagctaattaagatagttgaccagttgcagaatgaaaagaaagaacaagccaaaaaagacaacgctagcgtttatgagcgcttgtcaaaagtagatgtttctaagtttgttgataaaaagaatggtcttaattatctaagctgggcgaaagcctggggtctggtaaagagtattttccctgatgctagttataagctgcgggaatacccatattacacacaaacagcagacggtaattatcagcagattggtacacacgattacttacgtactgagtacggcgttgaagttgaagccagcgtaactattaaaggtgagacatatagttcaaagctttatgtcatggactttcacaatagggcacttgaccctaaaaaagttacttactttgaaattaataaaacgcaaatgcgggcattaaccaaagcgttagcattcgcaggactaggtttgaacatttacgctggtgaagatttaccaagcaacgacgaaaaaacgccacagcgtaaagaaagagtgaccgagcaagagttaattgaaaaagctagaaagagtagaacccagtatggtggcgataatgagttagttaccgatattgtggggctcgaaattgatggagataaacaagcaaacgcttttttgaaccaatggtgtgaaaaagataagaaaaacaagaatttatataaattcattatgaagaatcaattagctacacatggcatgaaggtaggagcataaaaatgggtgaagagcaacaagtgtttgaagggtcaaaagccttcttaatgattccaccagctattgaacgggataaggatttactaaaaaagcccaaaacaattcttttaatgggtgaaattatttcgatgctgaatgttaccggtcagttctttatgagcaacaagaaaatagctgaaagacttgatgttgatcctcgtactgttaatagatatcttgaccttttagaaaagaaaaaattaatcaaaagggaaaatatcaaaagcaacgaaaatggtgcaattataggtcgaacaatacgcgctggcaacgacctcatgacatacatgtcaatagggtggcgacatgatagtcatgggggtactgacacagatgtcacaatccccatgacaccacggtcaactaaatataacagtaataatagaacatctaatagaacagtagaagatacatatagttctgctggcgcagaacaacctatcccctacaaagaaattattgattatcttaactctaagactagaaaacatctggattatagaactaagtcttatcagcgattaattcgtggtagatggaatgacaatgtcagaaaagacaaaactcctgaacagaagctagctgactttaaaaaagttattgataataaggcatttgattggcagggtgatgcaaagatgtggaattacatgaagcctagcaccttatttgctccatcacatttcgatgagtatttgaaccaaaatgatactcgttatgtaccacctgcaaatggaggatatggcggtgaagcagatttgccaccattgccagatgatgatgatttaccgttttagggtggcgagattatgcaaagcttagaaggtattgcaattaaaaccgaaaaatctgacaaaatgtgtcttaaacataacatccctatggcgttagataggcaaggaaaaccattttgtacagaatgtatcaaagaacaaattaaggcagaaaaagaaaagcaagttgcaaagtttaatcatgacaaaattgttagtattttgcgccgtaaaagcttagttgatgatgtaaatgactttgataagttatttagtaatttcgaggcagataagggctcaaaagaggcacaaatgggcaatcttgcttataaagtggcacatgaattaatcgataatccacagaagccaattacagctttattttatgggaccccaggtgaaggaaaaagccatcttgccatgtcggtcttgaatgaagttaatcaaaaaagcaagccaccacagaaatgcttgtttgtagatattaataacttgtttgatgcgatttatcactcaaaagatgatccaacaagttggtggacagaatataatgcgattcagtttttaggtgatgtagatgttttagttattgatgattttggtagtgaatcatcaatgcgcagggatgcaacagaagccacagaattcaagcagaaagttttaaagaaaattcttgataaacagagacgtttaatcgtgacaactaatttgacgctgtcacagttgcaacaaacatatagccctaaaattgttagtcgtttgttatcggattcacgtggtagacgcttagattttacaggaatttcagataaaagattggagctataacacatgattaaagtagtacagccaccatgtgactactgcaacttcaagagcagaaatagagccacatatgtgcttagagaaaagaatggcaggtttggtggcttcttgtcgctaaataatgatggatcctttgacatcaatcgagggatgtataagacagaaaagaaaccgaatttttgcccgaattgcggtagagatttaaggaaagacgctacacaagataaagataagtaattgagaggatagacaaaatgcgtaagtttgtagctattgaagttggaccaaggtccagcgttgaggtagatgttgaaggtcgttggctggtacggtggggtgttcctatcacgattaggggatttaaattcttttttgtaccaatggcaaacccaaaaaacgtgagaattgaagcttattcgcttgatagtttgaaaacttttgataggtttcacatttcacatgaagtagcttggaaaggttgctcaacggaagaaggctttattcggacggtcatgccgtttataactcgaattgataagcgtttggataatttagatgacgatggctggaaaacggtattcagggatgaatacatttcagcaattgcacagtgtggtgcaagaaactcaaaagaagctaagttactagatgattttaagaaacggaaatagcaatgaatgactaggcaagaatttattgacatgctaagcctctataaaggcgttgaggttcaatttagcgaatcaaataagtatgtttccatcacacttacgaaatacacagattgttggggcggcgcttcaccagaagttggcttttattggggtgaacaaggtgtttctgttagctatacagatggattagaaccggaagcacttcttcaattgtcatacgttttgaagctagtgtatgagtacttgcagaaaggaacatggaaatgagcaaaaagaaagtcaaagaaaaacttaaactttattatttttctcaatgggatgatccgtacgacgtgtataacgaatttacggttttagccaaatcggaagatgatgcgtggaaacaaattaaagaaaagatgaaagaaccagaaggctacggaacggattataacggcaacacgtatccgtgttatggaacgtatgagcataatcgctctgtttacaaagttaagtgctatccggtagataagcctgttgtaattagacatttttcagcagattagcaaaggagtgcaaatgattgatgtaatcaaagtcctgctggtcatgttcatcgtcaccgcgatggtgtggctggcggcgtatacggtattgactgcggtaaatgctttaaaagattggatgtatttagctaaaggaatgattttaagtttgtctaaagagatgaaaggaacatggaaatgaaaatcgatttaccagtaggaaccagagcaaccttagaagaatttatcgatgcttatataccgtattttttaatgaagtatggctatagggaatacagccatgttttacctttaggcacaagaaaaatctgttgtcgatctgtgaagactaagtatggtgagattattgtccatgatgacgacgtcttaacctacgtaggcggcaaaaaatgggctgtagagcaaagaaaggagcatagagatggaattacacaaaggtgataaatacaaggacgttgacggcactgaatttcaggtgttcggtgctttggatgacacgtatacatattttttcattgctaacttaaagcaaaatatcgtaattagaatgcaacctaaaaatgcaactgagtttctatcaggcatggagaaggtgaattgatggacggatactcaatgatgctacttttaggtgtgttctgttggattgtttcaagcagcggtgaaagcagaaactccacagttaatacaatcatttttggagtatcagttgtagcattggtgtttttaaggctatttaaagtgttatagaggggatttgggcgaatggctgagcgtaaggatgttaacaaatttttaaagaaagatttctgggggtacatgtatcaaggcggcattcatccagggcaattaacagggactagttttgatttagcaccagcagggcatagtaataccaactcgaccgaaaaagcttatgtggacactatgagtaaagcagagcgagcacagtacttagccttgactgtcttagtagcgattaaagactgcactgactttgagtatcatggcaaacatagaaccatcttggaaaattactatatccaaaatcttaataattaccaaactcaggtaaaagttggcatgaatgacagtgaatataaaactgcaaagaaaaatgcattgaaagagttcatcagtcgttatgattactggcgtgacgctcgtgattgtcctgaattgccgccccttttctaccctcaaaaacccaaaaatcgcccaaaatctatccaaaagtaaaccatttttcacccaaaaatcgcctaaaaagcgaccgcaattcaaccatgaagggaagtatattggtattgtcgaaaaattaggaagcacgagatctgattttttgacacggcgtgaataccaagtaagttaagttcattaatttaacctcctttaaaattatggtaagaatcgtgaaagcctgaacaggcaaaaagacacgtccgacttaaagttgcggtggtgttggtgtaagtccaaccacgattcataggctctcaagttgggagccaattaacaattcttatattcctttattattgttgttttgtctgatagtgaagcggcgtggaaaaccgtagatctacgctttatacagaggtatagcagttcgactctgctgtgtctcttagcttgcgaagacccaaggaaaacggcgagcaagcgcaaacactgtccgtcacctgtaccatcaacgtcaggtgacaccatgagtcagacaggtgtgtatgcaagttgtggtcttattgcatgccgaggttcaattcctcgttgattctttgatcctttcaggatcacgtgttaagtcagcatttatatgctgatctgatcagtcttgtaccggtcatttgtttttcgaaaatgttgcatgtagattacagtatatctggtgtgcagtggtatacacgtgagttcaaatctcacactgatcattaggaggaaaaattaatgaaagctttatccgtacgtggtgactatattatgcagatgatagaaggtaccaagaagattgaatacaggacatggcagacaaaatatcgtggaccattgctaatgtgttcaaccgctaaaaaagtggctggcgcagtacctggatatgcaatttgcatagtcaatctaaaagacattgaatggagtgatttcgatgaatgttttcattggagcattgaattacaagatttaattgagcctgtgcccgttaaaggacagctcaagctatttaatgttgatgatagtatgattacacctgttaaagacaaaaaggcttggaaagcaaaaatagagcctttaatttacaagccacgaaaacgaaaaaataagcgctaaaaggcgcttttttattttggtgaaaattatgtataaaacaaaaagattcggattggttagctctaagacagaaaatcaaattttagcagagctggagcgagatctaaaaagagaaaggaacaacaaacatgagtctactagacgtaatcaagacacaaagcctgatcacagatagtgtgcttgtttccttttctatgggtaaagattcgattgttacgttagatctatgtatgaagtactttaagcacgttcaaccgttctttatgtacttagtacctggattgcagtttcaagatgaagcactagaaaagtatgaaaagcgctacggtgttgaaattattgaagtacctcactttgaaaatgctgacttttatagatacggctcttttagagatgctgactatagtgtcccaagagtgaaaattagagcaatctatgaagctttgaggcaggacacgggcatttactggattgccggcggcgaaaagattaatgattcaattgtgcggcgcgcaatgctaaagagcacaggttcaattgatgaaaagcgtggtcgtttctaccctgtcatgtactggactgataaagagattaagcagtatatgaggatgaaccacctgttctatccaaaattcaaccaggaactaggattcagctttcatagtttagctggtaaagagctatcagcaattaaaaagatttatccggacgactatcagagaatattgaaatttttccctgaagctgaagccggtgttttacagtatgagacttataagagaggtgaaaagtgatggttaggaaattgttcccagatttacattcttgggcggctgatggtgctgctagcttgcatcgttatcctgaaggtacaaaagctccgagatctttagctggagacagagccgagcgcagatggtcaagacaagttgaacaacagatgaaatacttggatgatccaaaatatatcaaagcgcaagagcgctaccaaaagcaaaataaagcggatgacaatgcgatggctaagatgcggacagcagtagcaaaggaatatcacaaaaagcatcctgaattgtccaggattagagctagattgcggtcgattcaaacaggtacaggggctaaaattatgagtctatacaatcagggatggagcggcactgaaattgctaaaaagcttcgatttaatgcaaaaaaaggcacttttggacgttcggggggtagaaatctcttgtgacaaaaggcaatttcaaaagatgatcaacaggaagcagaggaggttaatgatggctcgcaaaagagtaatgtctgaacaagaataccttaatcgcaaaggcgttggaagttaattaagtggagttatggatgaccgcttgcgttctgtcagacaacttagatccacacgaggagaagaaaaattcaatcgtgacaacaaaagtgctatagatagttaccatgccaaacgaaaccaagctagacgcgaatatcaaagactagtatctagcgggaaagttcgaccacctagtaatgctgaaaaagcatggaagactgcacatggattatctgaaaacagagctgtacaagcagcaagacgtgtactggctaaacatggcgtagattggaaaactggcaaaagaatagggacagtttctggtagaggactatggcctacttttcgtaaaggttcaacaggcagcagagggggctagttatgtctaaaccattacaacattttaaatttggaacagtaaaaagatcacaaatcaagttcgctgactataatcctcgtatcattgatgaaagcaaccagaagaagctcattaaagcaatcagagagaatggattaatcgagccgctagtatggaataagcgtacaggtgtgttagtgggcggacatcaacgtttaaccgcagctgataagatttaccgtaaaaaagattatgaagtacctgtagcaattattgacgttgatgagaagactgaaaagaagctaaatgtacaactcaataacccatcgatacaaggcgattgggacttagatgagttagctgatctatctaaggatgtttcgtttgatgatatgggctttgacaaatctgatattgatttcatgtttgatggtgaggttgattttgatggaaaaattaaagatgaaccaccagagagcaagaaagaaacgccttatgatgatgaagtcgaagacgaaaaagacaaattagctagtcttgctgaattcaataagaagaaagccgactttagacataaagacaaggacacaaccattatcaatttttataccaaggttgttttcccatctaatgaagctaaagaagagttctataaaaaggctaatattccagccaacgaagaatttatcacgttcgatcagttaaaacggtattttgaaaagaaataggtgagttaaatggctaaagcaaaatgggaacagtggctaaagcctgaaaatctcactttacttcaaggctgggctagagacgggcttacaaacgatcaaatagccaagaaaatgggcatagtgcgttctacgcttcaatcatggataaagacacatgaggacatttcaaacgccctaaaaaagggtaaagaggtcgttgatgctgaaattgaaaacagtttgatttcaacgatgaagaaacacactgttaccacgacaacttataagatggtcaaaaaggatgaatttaatctaaaagcagagcggattaaatttagtaatgtgtacaaactggaccaccctgaagcttcaaaacaagaaatcttgattgctacagctgcgaacgtagatgtctatgaaaagataccgattagcaaaacggtgactgaagtagacccgaatgtatcagctgctattttttggcttaaaaaccgtagacccgacaaatttagagaccaaacgttccagaagcttaatgaagccaacgcacgcaaggctattgctgatgctggtattagtgaagcgcaacttaagtcacttaaggaagaagacaatccaagcaatcgcacggttattgttgatgatgtagcaaagatgaaggagttgagagatcacgaaggcagtacagataagcaaggagattaatccacacttttatgatatgtggactactgataaaccttatgttgtttgcaaaggcggacgtggctcttttaagtccagcgttatcagcctgaagcttgtaacgatgatgatgttttacatcgcaatgggcaaaaccgtcaatgttatttgcattcgtgaaaatcagcagtacttacgtgactctgtatataatcaaatcctttgggctatgagcattttaggcgttgaatctgaattcagaacgcgtgttagccctatggtgattcaacatatacgcacaggatcaacgttttacttctacggtgccaatgaccctatgaaattgaaatccaatatcgtaggcaatgtggtggctgtatggtttgaagaatttagcaatttaaagaatgtgaatgtttttgatcagtctgtgcccacctttattcgacaaaagcctgatttcgttaaagatgtaaaaatattcattagttacaatccgccaagaaacccatatgcatgggtgaatgagtgggtaacacagcgagagactgatccagattactttgttgacagttccacgtatttagatgatgaacttggctttactactaagcagcagttagatctaattgaaaaatacaagcaaaatgaccccgattactaccgctggctctaccttggtgaggctgtcggattaggtacacaagtctataacatgaagctattcaaggttgtggaccgtattccagatgatgaatacattactgacatcttttacggaatggataccggttttatggtgtctgctacagcttgtgtagcgtgtgctttcacgaataagtacaacgtctatgttttagacacgttttactacgatccaacaaagtacgagcgtaaattatcagcatccgagcaagcggaacgagtacacgactttatcaatcagattactgataaatatggcgttttgccttgtaatcagacaatagatagtgctgatggcggtatttatacgcaatactggcagatgtacaacgtccaatggtctaaggtgcgtaaacttggtgaagccgagatgattgaccgtgttcaagatttagccgcacaagggcgcttgcatgttttgaaaacaccaggcaatgacatctttttagatgaacacaagaaataccagtgggatccagcaaccgttaatagcgatcatccgcgtgttatcaaagagtttgaccacagttgcgatgcacttaaatatggcgtgctagataatgagcagctacttggcttgtctgcataggtggtgagtacatgaacatatgggcaaggattaagagattttttcgtaaaggaggtgcaaagctaggcatggtagagtataaatcgctgagagctatcacagatgatccacgaattaaggctccagccgaagagtatgagcgcattcgcaaggcaaagaactattatcaagataacttgtcgcaagttaagtactatgcaatgggtaacgaacataaacgcaaacttaactcaatcaatgtcacaaaaatggcatcaaggcggcttgcatctctcatatttaacgagcaatgttctatcaaagttgatgatagtcaattgcaagacatattagacaccattctcaagcgtgaaaatttctataccacgtttgaaactgagctagaaaagtggattgcattaggctctggcggtatccgtccttatgttgaagatgacaaagtaaaacttagttatgctgacgctgacgatgtttacccgcttaattcaaacacaaccaaggtggatgaaattgcattgtccaggcgtattcgcaagattgaaaacaacgaagctgtttactataccttgttagagttccatcagtggggcagtagcaaagaagtagacgatcaaggaaatgtttaccgaccttacacgattactaatgagttgtatagatcaggtgactcaaacagcatcggtgagcttgtaccacttaattcaattgatgaatatgctgacttgcaaccacagtcaacatttcagcatttagaaaagccgctttttgccttttaccgtaatgcaggagcaaacaacaagagcctagctagtccattaggtttaggcttgtgtgataactattggcacacggtagacgacattaacgctacacacgatggctttgcatgggacgtgaagactgggtacaggcggatcaccattccgaaaacgtgggtaagacgtcaaacacagatcaacggcaaatcgattcctgaaggctcacagatgtattgggatcctaaagatgcggtattcgtaccaattaacgcctgtaatgatgactctagttcattcaaggatttagcaattcaaattagaacggaacaatacacggcttcaatggacttctttttacatgaatttgaaaatgaagttggattaagtcaaggcacgtttaccacctcaccaactggcgttcaaaccgctacagaagtagtaaccaataactcaatgacttaccaaacgcggtcatcttatttaacgcaagttgaaaagatgattgaccagctggtatatgcgattgctgaactacttcaaacgcctgatgtatggagtgatagaaaagctcggtggtctggtgacattgataagctgacaattacgcctgattttaacgatggtgtatttgttgaccaagaagcccagcgccaaagtgatttacaggctgttcaggctggtattttgcctaaaaagcaattcttaatgagaaactacaatcttgatgagaatacggctgaccagtggttaagtgaaattcaagatgagcaatcaccagagccgccagagcaagaaatgtcaatgtttcctagtgagggtggtgtagcaagtgacagatcaagagataacgcaagcccagatgatggagaaagcaagtaatattgctgattattatgcttacacagaacaacagatgttctatatcttgattgactcatttaaaaagacacgtccagagttgatgaatgctgaaaaagacccacaaaaaataatggaatggcgattaaaggccctatctgaattgggcggattaactgataaggtgattaatttaatcagtcgttctagcggctattctaagcgtgctatttatgacttgattgaaaaagatgggctaaaggttactaagcagttcaatcgtaaacttgctaaaacgctaaaaaagcccgtacacgatgtttctttacagtctagggcaattatcaatagttacgtcaatcaaacgatgagaggcgttgacaattacgtcaatcaaaccttattaactcgtaactatagcaagaatgcggctgctaagacataccaagaaatagtaaataagactgttaacgatgtgattgtaggcaaaaagaccccacaaagggcactaatggacaatatttaccagtggcgcgataaaggtatgagttcagcgttaattgacaaagcaggtcatgaatggagccttgagggctacacacgtacagtgattcagtcaaccacttcacgtgtttacaatgatttgcgtattaattcaatgcaagagttcgattccgtgctttgtgttatgagttcacaccccgcagctcgtccagcatgcgcaccaattcaaggtaaagtggtgtgcattgtaccgactagtgaccctagatataaaaaaggctatccgagcatttatgactatgggtatggtacaccagcaggaacgcagggcgttaattgtggtcatgctctttgggcttatgttgaaggcgtatcgcacaattatcaaaaacaatatgatcctaaagaagctgtagcaaagatgaaagtacagcagaaacaacgctattacgagcgtggagtacgtaaaaataagcgcaaattagaactagccaagcgtgctggggatgctgacggaataagtaagtattcggctggtgttcgaggttatcaggctaaattaagaaaaattgttaaggatcacgatttcttagcaagacaatattcaagggagcaaatagcaaaggagaaataatatggatcagttaacacgcgaaatcaatgacttacagaacgaaaaggacggtctaataggtaaaattgttaacttagactcttacttaatggaacacacgctatttattggtcatgaaaaagagtatttaagaacacaaagatcaatcatgatgagttatgttcaaatgcttgatttacgaattaatgaactaaagcaatatcaaaagaagcacaattaatttaaataatcgacccgagtaagtcttaaaactgcttattttttatgctcttatcgtggtcgtaccacgtataaattaaacgttaggagaaaaatatggaacgtgaatttttagaaaaacaaggcttgaatgctgatcaagtaaaggctgtcatggctcaatatggtaaagacgttagtgaattaaaaagtaaggcttctaaagctgataactttgaaactcaaattggcgatcttaaagaccaactgaaagaccgtgacaagcaattgactgacctgggcaagcaagccggcgacaatgacgctttaaaagccaaaattgctgaattgaaggacgctaacaagcaaactcagaaggattatgaagctaaattagcaaaacagaaccgtgattttgctgtttctactgcactcggtaaagctggtgcaattgaaaataaggcggtcttaccatttattgacatggacaaggtctctgttgacaacaacggcaacctgctaggctttgaagaccaattggaagccgctaaaaaggatcattcattcctgttcaagcaggaagaaaagaaaacagaatcaaagcccacgccgcatattgtgtctagtggcaacaatgattcagatgttgaaaagaagccatctgaaatgagtcttgacgaacaaaccgcgttgtatcgtaaagaccctgacagatgggcacaattatttaatagataggagttttaaatggctgaaacacatttaaaagatatgattattcccactgtctttggcaactgggtgcaaaatctttcagaaaagaccaataattttatcaagtcgggtattatgaccgccgattcagatttaggtggacgtttaaatcaacctggtaccaagatcactattccatatatcaacgacttagacggtacgccaaacaattggaccgacgatactgacattcctgtagacaaccttacttcaggctcacaagttggtatgaaattctaccaaaacaaggctttcggtgaaactgatctttcacggcttatgaccggtgcgccaattcaacaacaaatcgcttcaagatttgctaatttctggaatactagtgatcaagttatgctgtttgcagtccttaaaggcatgttccaagtcgatgacattgctaattcaaaggtgctcgacttaacagtgcaatcaccaactgacgctaatttcagtgctaagggatttattgcagcactttcactcataggcgatcaaccagaaaatattttgagtgctattgcagttaactcaactacctatgcgatgatgaagtcacaaaatttgattgatcctattcagccttcaaacggtgctactccaatcaacgtctataatggcaagcaagtagttattgatgacgatattcctgtaaacgatgatggcacttctgtagcatatctgttcggtaacggtgccattagatactcaacttcaatgtatggcactcaagtagtagatgagccacttaagcaaggtggacgtgaatccgttgtacaaaagcgcgtcggctgtattcaccctgctggtatgtcaattgaaccatcatttgtaccaacaaaggcaaacttcccaacacctgaagactttgctaagaaagaagcttggacaatgcctaaggatgttgacgttaagaaggtccatttggttgagtacaagttcaagcttgacccattctttgtcttaaagcaaaagtctcaaaaggctgttgacaaggcaaagcaaaatgctgaacaagatactgacaaggatcaaggcaagtaattaggaggctagattatgacgccactgttagattatgagacatatgaaaagctaggcggcacggcaccagaggacaaatttgctaagttggagctagatgcggaagacctgattaatccaagaacgaatttttattacttgtctcattcaattgacactgacgcagataaggaaagggtttacctatttagaaaggccttgaccctgcaaattaattactcaaatgatgttggtgcgtctacgccttatgaaatgtctgataaggatattaaaagcgtatctgtggacggtacaaccgtcacgaaaggaaccactccaattaatttcgtaactgatggtgtctataatctggctactgattatttatttagagctggcttgctctatcgaggtgtgccttatgattagaccacctaaagcgatgttccaagatactatcaccctgaagcatttagaagccgataagagcgacccctacggtgaaagtgaaacagttactcaaactgagattaaaaacgtgagattcagccttagaacagtgtattcgggtactaacaatgataggcaagttgtagcaaacgccacaattgtggtcatgtctacgtactcggagccgttctatgaattcacggagcaaaatcagggcgacaaaattgtttttaatggtcatgaatacacgattaagacaattaaccgtgacatcgagccttttactaatcaggtctatcaatatagattgtgggtgatctgatgggtgttaaagttcatgtaaacctatcaggcttaaaccgtaaattaagcgctgagagcctaaaaagagcacgtaagttaatggctaatgatgcacttcaagcaatgaataaatatgtgcctagttcatcacagggcaacgatgaaagcggctcaactcttagaggaatgtcaagcgttgctgaagatggctcaagtgttatgtaccgcgcaatttatgcaagggcgcaattttacggttttattaccaataagtacggtggtccctttagaattcacaattacactacgcctggcacgtctagacggtgggatttacggctaaaaggccataaagaagacatgaatcatgtcaaagaagcttttgtgaaaggattggacctgaagtaatgctagtaaatgatttacaagaagcgttggttaataacatcaatcgccgaattgactcgggcttttttacctacaataaggatcatgtgctgatcaagtatcttgataaagatgatgtagttggtctagtgcctaatccaggtagccacatggtcagtatggacatggctggtgaagagtactggcaatacaattactcaattactatgcggactaaatcaagagctgaagcacataatcggttatttgagttaagtcagtatctgcaattgctgaatcaaacaaaagatttaattagtaaaaatggctcgtgggtatttgatcagattgaggtacctaacgaaccagcagaaattcaagaagatttacaaggaacagttacatattcgatggacgtggctgtttttatttacaaacaaagaggaattttttaaatggcagaagcacaaactaaattcatgcctggtactaaggcagacaatacaggttttccagaaaactttgtcaatcgtatttttatcgatactaagccaaacgtagataatgcaggcgatgttgacttagacgatgtaactaatggctcatgggcttgggtagcctcaggtatcactagtcaaacaccaagtgccaacgaaacaaccactaatgacgcatattacgatggtggcggctttactgataccgacgttaccggtaaacaaattcaaattgctatttcaggtaatcgcaaagttggtgatccagcacaagactttgtagaaaagttgttctttaagtttggcacatctgttaagacccgtgttatttggattaagaacaatttaccaattattgcgcgttgtactatttcaaacattgttcctactggtggtaacgccaatgcaaaacaaactttcagtttcaacattgcctttaacggtcggccaaagatctttaatggtcaattaaccatgactgcaaccagtgtagcaaagatctatagcgcttctgttgattcttcaaagaaggcggctaatgatgatgaccttgttccagctgtaattaaagaagaagcagacgcaacagcgtcatctggttctgacacaggatcagcaggaactggtaaggacaagtaaacaaagttaggagaattaatagatgagtgtaattgaattagatggtttaaagaattttaacaacgtacgtgaaattaagctcccaggtattgaaaagacttggaagatcaagttcgatgacaattatcgtgtacaatccagtttaattgctagtcaagtggacaagctttatcaagaacaatcatctgatgattatgaggaagaattgcttgacatggcaccagcagaacgtcgcaagcgccttaccagtgatttagctaagtttaaaaaggcttgcgtagatggcttgagtgccttacttcaagacgataatgcaggtgaagaaatctataaggctatgggcgaatcaactgaaatttgtgcccaaattattggcaagatcaacgacactgctgataaggtgctcaacgtcgctaaggacgaagagaagaccgcaaagtacgacacggaaagatagtgaacttatgctaagtcttactcatagcccaacaacacagttttcgtggaatggggaaatttatgatattgacctagcgtttgacactgtcttactgtatctgcaattgcaggaagaccaagaattaaacccattccaaaaatggcggcaatcttgtaaattgttttttggcaaaaatcaaagattgccaagtgatccggatttttacgcgaaatcatttgagaaaatctcaagaattatcactgatcagccatatggactaaaggaaccagaaaaagatgatggaggtatagaagcaaccaaacagtttgactatgtcagggatgcgggcgctatctatgcctctttttttgaacaatacggaattgacctcaacaaagaacgaggaaaaatgcattggaccgtcttcaaagccttatttgatgggctaggtcctaaaacatactttcaacgtattttggagattaggcgtgaagacgccagcaagattgaggatcctacagataggcaagaactgcttgatgctcaaaactactatgcggttgatggctctaagactgaaaaggaattagagcaacaagctttgaacagtagtagcttgtccaacatgttcgattcgttactagatcaagcaaagaaaggaggtaactgatggctgacggtacaattaagattgacattgatattcctgttgaaaaggttcgatctgatactaaagaagtcgaccatatggttgaaaatatcggtaagaatgctggtaaagacatggacggctcttttaagaagaatgccgaaaacgttaagcgtgaagctaagtctgcaggggatgcgatagataaagatttaggcaaggaacataaagctaagatcaaggttgacgactctgaagctaaatctaaggttagtgaggctaagcatgatttagacgagctacctaaagaacgcaaaactaagattgacgctgataattctgatgctgaccgtaaaataaatgagacaaagcgcaagactaacgaattgccaaaaaagcataatactgacattgacgccaccgatcacacaggtggcgtttttgctaggattaagtctcactttgacaaggtcaatgaagaaggcaagaaaacacatagtctttttggaactatcttttcagcgaatattgtttctaatgcggctatgggagcttttggacgcgttaaagacgcattaggtggaatgataggcgaagctaagcaatacgccctagaacagcaaacaatgaatgccacgtggctgactttgactaatagtgcttccaaaggcaaagctatggtaaatcaaattaatactatggctgcagctgctcaaaatagtacccacatggtcgaccagttatctcaaaaattctatgcaattaacaatagtgcagagcaaacgggtaagttgactaaggcagttctgacattacaggatgcttttggccaaagtgatgcggcagtcgaaaactttggtactcagtttgctcaaatgatggctaacggtaaagtatcagcacaagacatgatgtctatcgttaatacttttccaaagctaaagcctatgttgctggattatgaacggcaaattcaccacagcaaaaacatgacgatgtccgaaatgtccgacttgatgtcaaaaggaaaaatcaagtcgcaagatatgatcaatgttgtgctaagagctggcaagaaatttcaagccgcaactggaaactttaccaaaaccattcctggtatgaagcgtacagttgaggctgaaatgcctagacttttacaagccttcgaaggtccattaactaaaatgcagagtcctatctatggtgctgtatctaagtgggtaagtagcaaaaaaacagagaaagaatttggtgcgcttggtaagactgtatctcacggaatgaatcaagtgatgaaggctttttctggtggcaaaggcgtaaatgcaactaaggccctggacaatgctattaacggtattaataagggacttaaaggcgtgtttggctggattagcggtcatgctaaagacctcaaaacaattgtttcaagtgttgcaagtattggtggtcagctagctaaagcggtttggaaggactttgcctcaattattaccactatcggcaatatgtttggcatcaccgccaaaaatggaaaagcctctggtggtgctgttcatgtccttgcagaagccttaaattggttagctaaacaaaaatgggctataaaaaccattgctgcttctctggtaaccatagcaaccattaagcaactggatcatgttgctggcagcttattttcaattggcaagaaaggctatcatgcttacaaagatgtaaaagccttaagagctgggctaaaaggggttcaagatatcaagaacttcagcaagaccgaacaaggttttgtaagaattggtagcgcagctcgtagtgctgctaaatgggctcgtggcttattcagtgcttcaaaaggtggcgctggtccacttaacggccttctgcagtccgctcactctgctggtggcttcaagaacttaactacagcgggcaaaattggcactggcttagctggtgctggtgttgctattgatgctggctcacagttcttaaatgcttacaaagatcgccataatgctgacaagcgtagtcaagatatcggtaaaggtattggtgctggtatcggcggtggaatcggattgtatttcggtggcccactaggtgcagcgcttggagccaaaattggtggctttattggtaaatggggtggcgaaggagttaaccaatttactaaagggtggcaatctcaaggtaaaaaagtaaaaccacaaaattgggtccagtggctaggacttcaagctcacaacagttttagtttctttgctggattaggcaaaaaagcaattaatggtattggcaaaggaattaatagctctaagcaatttatccaaaagaacggtaaagaactagctttaacgtttgctgatccgtgggctggaattcctgctttgattctgaaaaataatcctaaggcacgacaagccgtaagtaaattcgctaagggcatacaaaatggctttaagggcttgggtaaatggcttcataacctaccagctaacatgcacaaaggctggaaacagggtgttgaaaagtcacacaaagtgatgtctaagttctggaaagataccagcaaaggctggagaaatttctggaaaggcgttaataacaatcgttatgttaaggcttttaaaaaaggtgaattttttcaaactgctgtaaaggatatgaagtctcgctggaagtcattcagcaaagacttcagcaagaaatggaactcaacttggagaagtgctcaaaaacaaggcactaatttcaagaaaaagtttggtaaaacgtggaattctacttggaaaagcgcaaggtctaagtggaatagcttcaaaaagttatttagcaaagcttggtcaaataattggaaagccataaactccaatcgttatgttagagcttttaagaaaggtaaattcttcagtacagctctaaaggacatgcgttcacgttggaactcatttaagggctggctgggcaaaaattggaacaatttctggaagtctactaacaaatgggccaagtcttcatggaatgggacagtcaaaaactggaactccatgtggaactcaattaataaaggttggaatagcttcaaaggcaccatgaatagtgcttggaaaaacttctggggtggccttgcttcaatagtcaaaggctggggcaagactatcaaggatgactttactgggacaattaacaacgtcatcggtggcgtcaacgacgttattcatgccttaggcggcggtaaaaagactattgatttcttgcacttcgcttcaggtactgactggaaacacaagtatcctattcctgctatcttaaatgatggcactgacagcccgcaaacacacaatcgtgaatcaatcattcatgctaatggtgcgtgggagttattaccagacaagactaatctcaagcgctttttactacctggtgatgaagtggtaaatgctagagacacagctaaactgtttggcaacgctgttcactttgctagtggttcattaccttacggaatcagcctacctagcgttaattactctcaaattgaagaaaaggcactcaaacggcttcaacatatcaatgaggagcatttacagctagctaagaaagaagctcgcagaaagcaagctagagaccataagaaggacagtgagtccaaaaagagtaagaaaaagccatcaaaacataaaagttttactgctgatgtgaaaaaacgcaaaggctctattttagttgacacaggcttactctatgattctaaaaaagatactggtaaaggcacctacataaacgaaaagctgttcaagcgtttcatgtcttacactaaggctaaaccgattaaagtaagcaaaaacagccgtattcgttaccatgatttaccaactaaacgacaaggtaaatattacctagtagattcaaaatggctcacaggggctaaaaacaatactggtaagcttgaaaaactgaatcgtgaaagttatctaaagcttttacaatttactaaagctgaacgtaagtacaagctccctaaaaagaagcgtaaagcttcttccagccgtcgtagaacgacaactagaagaagacagtcatcaggttattcgagtaggtcatactctacaaggagatactcaactagaagttattcaacgggtggttattcacgtgttggtgcttctgtttctgctagtgtaagtggattgaagagtgtccaggctttgtctaaggcattaaaaggactcaagggcactcacaaagtcaaagtaaaagcatcagcaagtggtagcaagtcgattactaagctgactaaaagtattaaaaaggtagctggcaagcataaggtcaaattgcaactcacaggtactaagacagtatctaagctaagcaagaatcttaaaatacttactagtcgtgtcaagtctagtcgatcagctctatcaaagattaggactagcgctaaacatgcttctagcggtcttaaatcattaggaagccgttctagttcaacagctaaacacattaaggcgctgtacaaaactactaagaagtctaaatttggttctgcaatcgctaagcaagctgaaaaggccgttaagtctctcgaaggcaagggcaattttgccaaagcctttaagaaattggctaacgagactaagaaaactcttagcaagatgaagtctgaaactgaaaagaccttcaaagctatgtggaatactttgaagaaggattcttcaaatagcgagggaaagattgacagtgatctaggcaaattcggcagtaagttcaagcatcaatggaccagcattcaaagcggcgtcaagtcagcatttagcagattctggtcttcgatgaaaaggactgctagagacgggttaaatgacgttcttggcgttctcaatcaggctattggcaagattgataccgtagttagtcaattcggcggttcaaagaacgctgttcacaaagtggcaagactagcaacgggtactggtgctttaggtggtgtaagacgtccaattacggcacctacactggctatccttaatgacggcaatgacagccctgaaactggtaataaagaagctatttgggacagaaacacaggtgatgttgaagtcgttcctggtagatttactcctagaatccttaaaccaggtcaagaagtattcaacgcaaccgaaacagctctattaggctatacacagcctcagcattttgctacaggtaccggtgcacttaaagaactgtatcatatcgctaaaaacaattgggaacaccctcaaaaaaccggacaagctctatttagctctataaatggtcttactggtgcaattaatcagttagcccaaggagctaaaaaaaagggcgaaaatcaaggcgttaaatggtggtcacaactgtggaaaatggttgatgacaaggtcaatgatggcgctggaaatgtatccggattgcttaaagaagctattaaggtatccaagggcaagccgtatgtttggggtgctaaaggacctgacgcttttgactgttcaggcttggttgaatatgctgctagaaaacttggcattaatttatccgctccttctggcactgaatatagtcaagttgaacatattcctcgttcagaagcgcgcatgaatgacttggttttctacggtgctggcggtggtgaacacgtaggtattgttagagataaaaatacttattggtcagctcactcaccgacatcacaccctaatattggctatgacagcatcgatgctgcacctgcacatccaattcttttcggccgtattcgtggctatcattctaagaacgataaatctggtgacgttaaggcgaatactaagttgcaaaagcagattaaagaccaagtaggttcaggattctggaaaaccatccagaagattgctgacaagtacggcgataatggtatggcagcagcatttaaattaggcggttcagttggagcaagagctaaagcacttgcaaaagcaattaaacaagccgttccaggtgctactcgtaatggacttgctgggattatcggctcatgggaatttgaatctggcggtttaaatccagccgcagtgaatcctaatggtggagctagtgggctagggcagtggttaggctcacgtttaactaatttaaaggcttacgctagacgacaccataaatcatggaccgatccagctacgcaaattaattttgcagttaacggtgatggctcagacagtgcaacttttaagagaattgctagaggccatggttcaccaggcgaattagccaacgaattttcacaagaatgggaacgtggtggctatgatgcgcaacacgtagccgcagctaagcaaatcgtcggctggttaaaaggctatgcacgtggtggaattgtatctaagcctgaacttgctatggtaggtgaaggcaatgcaccagaatcaataattccgtgggatcctagtcagagatctagggcttaccaaattatgcaaacaacgcttgataacttcaaagctcaagatggcaatgctcagaaataccaaaatcaagctcagcaggttgttgacttaactaagacaaacgctgaaattcaagccattaacgacaaatttgatgaggcactagcggctttaggtattcttacgtcacaagatgaagtgattcaagttaacagctatcttgataagactaagattactgaggctatttatcatgtcatgaagcggatgaatattagatctaatagaaattcgaggtacaacataagtgggcattaatgataatagtgagattatttttcacaaccgaagctcaactgacttcggtattaaagttttatttcctttcaatccattggcaccagcgcctaaaaagcaaatgatgtcaattccagggcgttcaggtgactgggctactaacgacagtacttataattcgtcagaaacgcctgtaaatgtggtcattcatttacctagaagatatgaggactgggagcagctgaaaaatgacatcgaaaattggctatatggtgatgaagactggctgagatttagcagaaattctgattacttatatagagctcagatagttactgctcctacatttacacccgttaattttgaaagaactaacgcgacattcacatttcacttccaaccatataaatatgatgtcgattccattcattggcaggattttcccagaaacggtactgtatacaatcgtgaaaatatcgatgtaaaacctgactggcatattaatggtaaaggcaattttatgctcaaggttaacgatgtaccgtatgagtttaataacattgatggtgacatttatttaaaaggcgacgagggaaatgcatataccaacgatcctactgccgcctatttaattgatggattattaaatgatcacataagactagcaaataacaccgcacctgttctgtacgctgagggcaatggtagcaattcaatttcaattgaacctatggacactaattcaactttaaataaggctgagtttattcctagatggaggcgattaatttaatggttgatacggcaacaactgaagacactggttatgctattggattagatgctgaacaatcgccttatcaagatgtcatgcaatgtccattactactagggaacgccgtagatgacgctagtactcaaggtgaagcagcattgtttgactatatcgaatgtaaagtcacttggaacgccaatcaaattcctacattacagttaacgtatccagaagatggtaaattcattaagttaattcaggttgaaaaggttatagttggtgatattaacagaattttgactcaccaaaaatttagaatcaatgaagtgcttagaagtgatcaaaatattgtagtgaatgcgacacacattatcggtgagtacttggtcaataatcctattaaaggttcagagccaattacaggggctaatgtgacggcttcatggtgcataggcgagattctagggcacctagctaagccagtcccagagcttaactatgatagcaatgtgaccaaggtggcaaatgctaatattgatatttctaatacaaatgctttaaatgcattgcttgatgctgaccagatgggtgataagccaggtaactcagtcctcgcacaatatggcggggacttttattttgacaacacaaccatttatcatcgtgaaaatgcgggcgaagatagaaatattactgttagatacggtgagaacatccaaacatattcccaagaaaagaccatcaacgatatgtatgttggaatctatgcattcgctacatacaatccaggtcctactcttgcaacgctgaacaacgttgactggaatggtgtagccgatctgactgactggaatagtgttgcgacggttacttacaacgctagaggcgctgtagatatttacaatgcacctgttaaaggcgctcaagtaattgggcagctgacaacaggtacacagattcagcttggtaagcccattagcgatggccaaaccgtttctagttcggtcaaagctggcgtacagcttcaggttaatactatgaacggtgatcaatggtatccattggcttcaggcggctggataaatggtagttttgtcaacttcgataagactggcgactatgttgttaataacgtagttggacatatccatactgcaattgattcggctggtgcattggttagatatcctgttcacggtactggcacggtttcatacactgagggttataaaaatattcatgtttattactcacctgaccaaggctcacagcactatagacgtaataagccaggtactaataagccttggctgattcataacggctctaaaattaagtatgattatgtgacaactgatgaaaatggtaagacttggtatagaatcggtaaaaatgcatgggtgtatggtgatcacttatccactgataaaaacggtgatgttcaatcctactcttcacggggctatggcttggttaagagcggcgcaaagaaatacgctcttaaagagaaaacaggcacgatggaggtacaatatcatcacttaagtcttactgctgctagaaagcaacacaagaagaaatatatttacaaaggcaagggcaaaaagaaaaaagctatcaagaacccgaactatcaacgaggcaaggcaatcacccaaaagcacaagtactacaaccttaattatggtcaggtacgtgttggcggcgttctttattacaaattaagtaatggatcttatgtaaaagcttcagatattgacaagaaagcaagcaaaactactgttcctgaatcgcctagcaaaattatcagcgatattagcaaaaaccgcggaaagatcgaaatgtattccactccttcaaaagggagtgcggctaactggtcaattcctgctaacgttgagtttgatatttctaagagtgctcaaggtgcagatggcaagacatggtatcaggttacctataaaggcgttaccggttggattcctgctgagtatactagttcaagcggtaataatgatttagagccacaagctccagattcgagtgctaactcgtacgatgaaagctctgatgaaactatagcatcacctcaagatcaaacggtacgtgttgaattaaccgatgatttagataacgtggttaatggtgtaatttatccaacaggatttaataattcacctgaaaacgcacatattatgaagcttgatctatctaactgtattaaacatgatgaccaagacttatctgggttgcaagacgatggcacttataaagccactgctactgatattcagcaattgtatcaagcggctgttggttcactaaaggaatatcaaattggagttattcctattagtatgactgtcagctatgctgatttagatggtaacaaagccgacttactagctcttaatatgtacgatacggtaaatgttgattttgcccgctttgacaagattgaaaaaggtaaagtcagcggcaccgtttggcaaatgaaagggcaggactcttgctatgagtcggttacaattggcgatccacctaagtcttatgaacacctattgcttgaacaagccgataaaaacgcagctagtcaggtagcaagcgctgctggtcatacacaaggattgctaagcaggtataagaatatgcttgctcaagaaggctctaatcgtattgctgcagagcgtaaacttatggacgatctaggattagtacaacaccaagttgaccaaaatgggcgagatattaagactaatctggtaagtatgaagacttttgaaaatcagatgaacgagattcaaaattttgccaacgatatgactaattgggtcatgggatctggttcaggagttattcaagccaatcctaactggcaggagcctacgtcgctgtcagctacaactgctaatgggggacacatgtattttagtggtaatggactggtattcacggacgctggtggtcaagaaataccgcggtcaggcattgactctgaaggtcgtatatatgctgatgcaattaaagccggaaccattgaggctgttaacattaaatcatgcttggttgaaagtgctctaactattggtactgagggaggatcaatgaacatttacattgggactgaaaatccaagaagtcaactaacaccttacaatggtggtaacgttatttgggcaatgtctgacgggtatcaatcaatgatgtcatcaggtcaatttgcggtaacagatggcggcaatgaaactagaattcacccatcttatatcgaggttaatggttatcacgtaataacagaaggaaacatcaattattacattagaaatgcagtaagcgaatcagctattaaagcggctttgggtattccatcatatgcaaatgctgtttgggatggtggctcgtatccacatttatcagagtacattagacaacacattccttctcggtatcgtacgggactataggagtaaaaatgaacaatcaaggaaaaaatttagaatatacgcttgctggcaatttaggcaacatgattggtcagcaagctttgcaaattgcacatttacagattgcattgaagcggaaagatgaagaagcaacacaaaaagataatctaattgcggaactgaaacatcaaattgaatctttacaaaagagaggtggtgtaaatggcgaacgacaagctggtactaaacatcagcaaaattaacatttcacccgattcgaccaggctcaaatatagtcaagatgaacggggaaaacaggttgatataactgtaattgataatgatggcgttactgcttataacttaactggcaaaaaaattgttttttcagaaattaaagatggtgggaaaactatcattgatgatgaatcaacccatttcattagatcagctgacaacgataaaatcgggaagttcacttatatttttccagatcaaacttatcagcaatcaggagaagcgcgatttgaattcacaacggatatagaacacattgactcaaccatcagctttgatatttctattgtaagttctgctcaccttaagcctgataatacgtcctacgtaagctccttggtggcactagaaactcattacaaagcggttatttcaaatgctgaatccaatactcaaaacctaattaatagcctgactgacaaaatcgatcaggctatttctaatgggcaaagagatgtagctaatcagcttactgacatgcgaaaccaacttcaagcgattcaaaaccgagaaaatggtttaattcaaaattggactgctgatttcaacactcgtaaagctgattttgataagttaaagtcagattggcaggcgcaatctaaagctatttcggacagttatcaagctaagatcaatgaaatcaacacacaagctcaatctcagcataacgatatccaggctaaagcagatcagcaactcaaaaataaccagtctgctaatgatgctgaaattgccaagattaagtctgatgcacaagctcaacatgatcagattgaaaaggctaaaactgctgcaattgcagcagttaactctcaaagggatgctgcgattagcaaggcaaatgctgactttaaagctaagatcgatgcctttcaaaaagactatgacgcatggaaatcaaccacactagctgactttactaagcagttagctgatatcaagaccaacataagtaatgaccaatccacgctgaaagattttgacaagcagcttgactacaccaaagaaaagctaacggctatgactaaacagctagatagtttggactttaccaagttcgtgactggtgatcagtttaaggaagctatgagcaaaaaggcgagcggtctaaagattatgggattaggaggcgaatatgtcatggcagtagatcaaagcgatcaaaacatcaatggtttgcctaatagtgtgcaaggattagctgatattggggtgctttcaggggctttacaagtactagctgatgcgattttggacaagaatcactataccaagcctgaagtagataagatggtcaatgatgctaaagctgcaatcatgaataccgtcaacaccaaggctaatgcaagtgatttaaacaataaggctgacaagtctcaaattcagtccttaagttcacaattagaatcttataaacaggaaaacaataatcttaagaatgaaaatacacagctaactaatcgtgttcagacgctggaaagcaagcagttcatcgcacacgtggctcacgaatctgatgtagcaagtcagtcagcgctaattgtcatcgtggatgactagaaaggagtttatatgagcaaactaattttgaaagacaagaatggcaagcaagttgagttcttgaagaaagatgaatttgatggcaaagttaatacgacaaacgctttgcaccaaactaaatttgaaccttataatttgtacgacgctttgtccgaatatggaaatcaaacattaggcgcgattcataataattttagatcaatagataatcagtcattgattggcaattttgattcgttactagtatttggtggtgacgatgttaaacacgcaattgatattggaacctttgaaaaacgagttcgtatttctactaaaactgatgggagtgtttggcaagaagatctggttttaaagtctgactatgacagactttatgatcgtgtatgtgccttagaaaaaaaagtatggagggataactacaatgtcattaagttaagacattgacaaattgaatctaatctctgtagaaccgaatcattatgatttggttctttttttgcataaaataaaggcgaaaagaacctaccttttcgccctctgattaaattattaaaccttcaaaattattgccagaaagctggtgttaattatgaaagcccttcacagaaatattttagatcgtcttgatcaaattatcaatgatactggaaagcatattcatgattttatcgatgatcctcatgccttcactaggaagcggtttttagatgcagctacagtcattaaaactactattaatatgcaaggaaaagatttgaccagtgagttgtttagagcttttggccaaaaagctattaaaaataacgataaagtagtcagtacttccgcttatgtccaacgcaaaggtcagctttcacccgcatgttttaagcatattctaactgtatttaatcagaatttatttaatatccagttatttgatcataaatatcgtatatttgccattgatgggtctgattttaatcaaatctggaatcctaaatcagagaatatcgttggaaatctcaatcataaaggaaagccatattgccaaattcatgttaatgcactctatgacctgttaaataatacttatcaagactgcatctttcagcctaagtcaaagatggatgaacgtaaagccgccattcaaatgcttaaaaagctaaattgcggaccatatatagttactatggatcgaggttataccggctttaacatgattgaaaattgtaatcgcctgcctaactgttattatgtcatacgtactaaaacgggatatggcgcatttaaggaagtagctgagttgcctaatcaagagtgtgataaggatatagcttgctgggtgactacctctaattattattatgaaacccataaggctacagaaaacgttcatttggttaaccatcattaccgtcaatatataaaatatcggtctaaaaataccaaagatggcagctgggactttggagagttatgtacaataaaatttcgtgcctgtaaatttagaattaatgatcctaaatcaggcaaagaagaatgggaagttgttctaactaatctaaatagagccgattatcccttaaaaaggatcaaagaaatctaccatttgcgctggggcattgaaacttcattcaaaaagttgaaatatgctttaggtagcgtacagtttcattccaagcaggatagatttattgaaatggagatctatgcccacatgattatgtttaacgcagtcagtcaaattgatgctcaagcatatgtaccacaaaaaaactgcaagtatcaatatgcgatcaatttcaaacagtcatgttttgtcatccaggctatgtatataatttcttcttcaactgaaatctttaaaaagattcttattcaaattagtcattacacaattccgatcagaccaggacgaaaagacaaaagaaatctcaaacccaaatcagctgtatattatttatatcgtgtagcctaatttctaaacaaaatttgggtttatttggcatgaaaaaagatcattcaaatgcgataaatcgcaaatgaatgatcttaaaagtccaagtcgataatttgtcaatgtcttaacttaatgacattggggataactaggtacctatacgcctgtcttatcaatactttagctgcttccacaaaggaggtagcgtaatgaagatttatggtaaaactgacaacggttatagtagacttgcaactttagatgaagtaagtggcgcttatccactagctgggattaatatgcttccggcttcttcaatgcaaaacacgagtgctgaattcttaaaagcatgtggttgggaaagtgattttgatccccaaaaaattcagatagatgatgatggcttaacgcttgactcaatgaactatgattttgtagacatcagtactattctttcaacagacattactccgtccactttctatacggtttctttatcactaatatgggccaacaacctcaatggagatctattctttgtcgaacttgatagtaatggcttaggatttaattaccctaattatcgagatcatcaaattcatgggatagaaaacttaatacttttacttttgaaacaagcaacaatcctgatctaaagcagcttaaattttttattagagcatataaaggctgcgcttttaagtttaagtatttaaaacttgaatatggtaaaaatgccacaatttggactccagcaggcggagacattgaaaaaacatatggagctttaaagtctcaacttggggggtaaagcctagctataggctttgcgtcacttctttaaaggaggtggcgtaggatgaaagtatatgttaatggttttcttttacttacagatactaatcaactattagatttacagagttcagtaattgatatcagccaacaggctgacgcaaataatttaagcaacgggaattatagattggataacgacctaccagcaaatgttccatctgattgtcattatggacttttaacatgtattaaagtggcaccaaattggacgttacagttttgcatttcttgggatgcaaaaatttacaaaagagcacaaattaatggccaatggacaaagacagaatagtttaaagcatccctagtagatgctttttttatggagaaaataaaatgaaacagaataattcaagaccgccaccagcggtctttttgatacaaaaaatcactagctacagaaaggaaaacattatgacagaagaaactgcaaatacacctgtacaaggtgcagaaaccgaacaacaaaatgtggccaacaatggccaaagtggtaataccgaacaaaagtctaagactttaaatgacgtcttacctggtgaaggaaccaatttggtttacatttcaggcatgctgcaaggtcagcaagttaactgtgaaggaccaatcgaatatacgcgcaagcttgatcatccacaatggccatttattcctgctttaccacagtacgatccaagcaagtgtaagacaccaacgtttgactggggcaaaggtcaatggaaggacgaaagcgaagaggctagagttaagcagcttaatgatttaaccgaaaaggttgcttcaatcacaactgatgtgggcaagattcaagaaactcaagaagccgctgcacaagaaaacgaggctagcgacaagaaagatgatcaagtctttaagctaatttctgctatgaatgttcaattaggtgttatcaacactaagcttagtcaagtaacttctaaggacaacgaggcatctactaagcctgctgtatctgctcaaaatactcaaaacggtacaaccaccgaaggaggtgctcaataatgtttgaaatttataaaatggaattcgatattggaatcgtaaccgctgttgatcttaaaagctacattggtatgggaattcttagtcaacccgactatgaaagaatcgtgggtgatgaatcccatgaagaaagcaattcaacgtctgaagtccaagcttaatgttcgaaatagtgagattttaattggtctctttatcttgggcaaaggattatggctttatcatgacagccactactttatttatccgccgcagtttcaaaacattgaaaatagccgctatatcgatttagggctaatccttttaggtgctctactgatgataacggcttttttagtaccttacatgaagacaaccaagcgaaaaatacagctgattatcgttagcaaagtgtttttagtgttggctggtgttgtgtgtatggttttagcattactgcagatcacacacggaatcttcacacccttttatcgtatgggacactcagcatggggtgactttatcattttttgctttgtctatctgacagctagcgacgcctaagaaggtgccgcgatgaaagatattgggaacgtgatagggtatttgataactgctgtcgggggtctgataagtgcaataactcttttttataaggcgttcagtagtagtaagcaaaatacacttgctggcatgttggctgaaaaagataacgaaattaagcaaaggactgaagatatggagctgtaccgaaaaagatggctcaaggttgaaaaggaaaacgacagattaaagaagaaattggaggaattagacaatgacgattaaagattggatttacttgggaattactgtagcaagttatattatcgctgtaattgctggcgtttacgctaaggacaaagctaagatcaatcgtgccacgcgtgctggtcaagcctacgatgtactaggcaaagttgcgactaacgctgtacacgaagttgagttcttgggtggtactagtaaggaaaagcgtcaaatgggttatgaactgattaaccaagctttgcactacatgggtattaatgatgtgacagctaacatgatctacggcgctttagaaaaggctgtagctgctatgaatttagctgatgttgaaaaaatggaaaatgatcctgctgtagcacaagatgtggatgaaaaagacatcctacaaccagtagatcaattgccaaaacctgaaaatccagctccaaccgatgctaaggatgtgactttagatggcaagtagacaactaggtattgatgcagctgtatatcaaggcactagcatgacagcttatcataatgctggtgcaaaatttggcattatcaaattgactgagggcacgggctatatcaatcctaaagctcactatcaaataaaatcattacatgctaatcatatgtacgttcatgcttatcactttgcgacttttggttataacgttagtcgtgctaaagctgaagcaaagttttttgtgagtcgtgctaaagctgaaagcattagcaagaaacgctatttatggcttgactgggaaactggtagtggtaactgcgttactggaggtaaggtggcaagtactaaggcaattttagcttttatgaaaatttgccacgatgctggttataaagtaggcttgtactctggtgcaagcctgcttagagctgcaattgatactaaaaaggtcattaagaaattcggcacttgtatctgggtagcatcatacccaaccgacttagcttataagccagactttagctatttcccttcgatggatggcgtagctatttggcaattctgtgataactggtgtgggcttggcgtggacggcaacatcagcttgattgacctccacaaagaaactacgactgtacataaggcagccaagccaaaaccaaagccagaaaagaaaactggtgtagtatgtgcgccgattattaactgcaaccctaactggatgatccagctaatggatagtaatggttattacactggcaagtacatcaagacaaatacgagatggaagtacttcgatgtcaagaatatcaagggaatgaaatgctataagttaggtactgataggcagtgggtacctgctaaattcttaaaagtaattgaatagaaggagttgaaaactccaggtgtcgtaaagaccgctctgggacaatgatcctagagcggtttttttgcggttttagttaaaaaatgttgcatatatactaatatgagtatataatataaagagtaaggagtaatgagatgtgctcaggatccttacgaaggtggtggtatccaatgaagcaccgcaaacgtaaacgcgtttctattgaagctcgctacaatagaaaaacagcaattatcaatttgataactgctgtcgttgctctaattgcttcgattgttggattactccactaatccaacacatgagggatcatctcccttgtgtgttttattatactataaattatgaaagtaggtccagaaaatgaatgatgaagaaaagaaatacaataaaactacttctaacattaataaaatagcgttagcaatctttgttatagcagtaataattttcattataggattggtgaagtaagatgtcagttagtgaagcacaaaaaaaggcaaccagaaagtgggataataaaaataaagctcgaaagcaatacttaaatcgcagatcggttaccaaaaattttattttgaaagaagctactacagaagatctggagcaaatcgagaaatatattgagcaaaaaagaaaaaagattaaaaatccagagtagtttaatgaagtatattgtttgtgaggtgaaacgatggattacttgaacggattaatcgaaaaagacagatacgaaacttatcttacaagaaaaaatattttagaagatttaattgaacaaaccttcaaaattcttaagtcttccactgattctaatgaaatcaaagaagaagctaaaaagttagtaaactatcgtttacagctgatagatgtaaacgaatatcttgaaaaaagtaaatagtggtttactatcgctaacagaaaagaagccatcttagagggataacctctgagatggctcttttgatagaactttgatagaaataaatgaaatgcttagaaaagttataaaggatatttgcttatataataaggaagaaaaataccagtaaatacagagaaaaagaataaataaaactctctgtctccgctatatagaaaagtaactgttctagattaatttctagagcagtttttttgtgtaccgagcggcattcttagtccgatgaaagtgttagaactaagagccagtagcaatgatattatgagtatgggacgtttacaaaggagtaaatacctgctgaaacagtaaggaattacaaatgtatcgtcttatatgcaaccatatgtatagtggatggaaggagatgagttcgttaagttctctctgcattgaaaacacgtcataagatgttaaaaccttaattttgagttattgataaacctaaatgcatattattttgaatgacttaatggaaattattacacttcttttaggtaaaagtcttggacattgattcaagtcaataatcgtgtatataacatagggagagccgattgttttaaatttcttcttgtatgatctatattaaaaaaataattttgtgggggatttcatagtgatataaagaagcagtttaatatggaacaatttataaagatcatttagttaaagataagagaagctgttttgctctagctaatttgaagtattaagatagatataaatgttttacaacaaaaaaataaaaaagtacttgcattttgactgaatatctattaatattaaatacgttgtgattgagagatcacaatagtaatagctaattaaaaaaataaataaaaagttcttgacttttgaaatgtgattagttattataataaagtgctcttgagtgagttacatgacccgttggtcaagtggttaagacacggccctttcacggccgtaacatgggttcaaatcccgtacgggtcattgccacaatttatttttttggcattaagcaatggaggattacccaagtggcttaaggggacggttttgaaaaccgttaggcggttctgccgcgcgtgggttcaaatcccacatcctccttagttgaatatcgcgggatggagcagtctggtagctcgtcgggctcataacccgaaggtcgttggttcaaatccagctcccgcaatttggtccattggagcagtggtttatctcgcctccctgtcacggaggagatcatgggttcaaatcccatatggaccgtaagatggctcggtagctcagttggtagagcaaaggattgaagctccttgtgtcggcggttcgattccgtcccgcgccatcatctggaggagtagcgaagtggctaaacgcggcggtctgtaaaaccgctctctctgagttcggcggttcgaatccaccctcctccataatagggatatcgtataaaggtagtacatcggtctccaaaaccgctagtgtgggttcaattcctactatccctgtttaccttcatggcggaattggtgaaggggttaacacactggtttgtggatccagcatgcgtgggttcgattcccacattccgccctagtattgggatatagccaagtggtaaggcattagactttgactctaacatgcgctggttcgaatccagctatcccaattctaaataatttcataacttatggcggtgtagccaagtggtaaggcagaggtctgcaaaaccttaatcgtcggttcaaatccgacctccgccttatcaaccgaataagttgattattttaaaatttaatattatggcggtgtggcggaattggcagacgcgtcagactcaaaatctggtgtccattacggacgtatcggttcgaccccgatcaccgctattattatgaagcgatccaattattggatcgctttttttttattttaaaatgttagcattttattatataaattgcacatgaatacaggaatctttataatgctacatatggaggtactcaaatgaatattggtctttataccgatacatattttccccagataagtggcgtagctacttcaattaaaacgttaaaagaagcgttggaaaagcaggggcataatgtatttatttttactactactgatccgaacgtgaaaaaaggaactgtagaaccgaatgtatttcgttttagcagtattccttttgtctcatttaccgatcggcgaatagcatttagaggactatttgaagcaaccaaagtagctaaagaagtcaatcttgatatagttcatactcaaactgaatttgcattaggtactattggcaaatatgtagctcatcaattagatattcctgctatccacacttaccatacgatgtatgaagattacttgcactatattttaaatgggcatttgcttcgtccatatcatgttagacaatttgttaaaagctatttgaaaaatatggatggatgtattgctcctagtggccgagttgaagaattattacggcgctatggcgttcaaataccaattagggtgattcctactggagtagatttgcagggcatgaacaacgatattcaacgtgatgtgcggcaagaacttggaattgatcaagatgcgcctgtaattttaaccttaagtagaattgcagccgaaaaaaagattaatcatattttgaacgtaatgcctgaaattattgatgaatttcctaatgtgaaatttgttatcgcaggtgatggccctgatgttgatgtgttaaaggatcaggtagagcgattaacactagagaattacgttatttttgtcggtaatgtagagcatggcgatgttggtaattattatcgaatggctgatctttttgtttcagctagtgatacagaaacacaggggttgacttatattgaggctctagctgcaggtacgccatgtgtggtttatgacacagactataccgaaaacatttttgatcaagatatttttgggcagacatttactacacaacaagaaatgttagaagagattattactttgcttaagcaagggacgaaaagaatcccgcaggaacttttgcaaaataaattacagaagatttcagctgatcaatttgctaaaaatgtgtctgatttttatcagtatgcaattgatcactatcaacctaagcatgatgaggagactaaaaagaggaactaaatgattagaattaatatgttctcgcaagctgattctgttaaaggacagggtgtaggttcagcttataatgaattgattaaacttcttaggacgcacttagtagacgaattttatgtaacgattaacaaatatggcaatagcgatttaacgcattatcacacgattaatccaacctattacgcaaatagtttttcaccagcacgtggcaggaagattggctatgttcactttttaccagatacattagaaggctcaattaagttgccaggcgtagctaaaaaagttttttatcaatatgtaattgatttttataaacgcatggatcaaattgttgtagttaatccaatctttattgataagttggttaactatggaattgatcggaacaaggttagatatattcctaattttgtttcaaaaacagaattttatgaagaatcattggccagcaaaaacgcatttcgtcatgaattaggaattccacttgataaatttgttgtttttggtgatggtcaagtacaggaacgcaaggggatcgatgactttgttaagatggcacaagctaatcctgatattcaatttatctgggcaggcggtttttcgtttggcaaaatcactgatggctatgatcattacaaagaaatggttgacaatccacctaagaatatgacgtttgcgggaattgtagagcgagagaagttagttaagtatttaaatattgcagacttatttgttcttccatcatatgatgaattgttcccaatgtcagttttggaagcattcagttgtggaacaccagtattattgcgtgaccttgatctttataaggcaattatcgatggctattatctaagcggaaaagattttggcgaaatgaatcaagtattgcaaaaagtagttgccaatccacaaactttgcagaaatacagcgaattatcgcgtaaggcaagtcaacagtattcagaagatcatttagctaaaatttgggacgaattttatcatgagcaatatgaattaggaaaagagctaggtcaaatacattaatgaataaaaaacatttgtggggcattctggttgttttagcaatcagtgcctttgtgctatatgcagatttaaaagctacaccgatatcggaaatattacgggcagctcatggcctgaatatttttgcattaatcatggtttttgctttaatgcttttgtcctatgtatgtgaagccggtatcttagctactttagctcatcgaaagaaagagcctaaaaggtcagcttggtcgtttttgcgaattccaattattcaagctctatttaatgcaattacaccaatgtccacgggtggacaaccatcacagctagccgcaatgattcaaatgggcatggaaggtggccgttccacctcaattttgctgatgaaatttattatttatcagatcgttgttttgtttgcctatgtatttacaattatttttggctttcacatggtaatgactaagttcgctggtttagcaatttttattgcaattggctttttgattcatgttagttcaattatctttttgctggcaattatgtttgcttatcgttttactaaaaaggcaactaattggttaatggacttgttggcaaaaatgatgaaaaaggaacgagttgagaagtggcgtaaggctactttagaaaagattgatactttttatgcagagagtcagaaactaaaaaaagaaaagaagaaattatttgttgcctcgcttttaacagtattgcagctacttttcttttactccgttccatttatggtattaacagcgctaaatgtaccttgttcttggtatcaagttacgcaaatgaatataatgattatcatgtttatggcgatcattcctattccaggtgcgtcaggaggggcagaatatagtttccaaacgttattctccaccttcatttcttcacatggtgcgttaattttggctatgtttatttggcgcttttcaacatattttttcggtatgcttctcggcatcttaggctggatttttgaaactgtcaaatcttttgtgtaaatagatctttctcgtaaattgattttttaattatttatttaatcaaagtaggattctaaggtgtcctgaacctgaccaaagcctttatgaattcgattgaaataacggtcattgtagctcattgcctgaatgccaataaaagcatcaagcgactgttcagttggaaactctgccttaggcttagctttgcgcttgatcacattgttaaatgattcaatcatgttagtcgaataaattgaagctctgatctgcttgggatagttataaaagaccagcagatctggttctatgtctttcaagcttctgataacatggctgtaaaccttgccccatttggtatagaagtcatgcaggacagctgtggcttcttctttgtttgtctgttgatgcacctgtttgaattcgttcatgatcttttcacgatcgtcgacgcgtactttagcgcagatattgcgcatgacatgaaccaaacagcgttgaaaatgagctttaggataagtcctggccaaggctgttttcatgccaacaacaccatcagaaagaaaaagctcaacttgctttaagcctcgggatttcatgttttgaagcatatctgtccagacttcaatgttctcgctaggcgcaatgcagtagtcaatgacctccttgtgcccattaggcttgatgccaatggcaatatagactgcttcacgctcaaatgtttctcggcgcaaaggaaggtatgtcgcatccaaatagacgcagaaaaacttgtcgcttagcttgcgtttgtggtaagcctcaacctttggaatcatctgcttggaaatatttgatacctgagctggactgtaatggctgccatacatcttttcaattagatcggctatttccctggtggtcacgcccttggagtaaagcttgataatcatgctttccaagatatccgagtgctgcttgtagtcaggcagcgtgtgctgatgaaattgaccgttgcgatcccggggcacttgcacttcaattgggccaaattgcgtatcaactttgcggaaataagcaccatttctagagttgccagtattccagccatttctggcatagggatcatagcccagaaaggcagtcaattcagcttctaacaagttattaacagcctgttgtagctctttgcgcaataaatcatttattttgtctggattgaatagagcttgagcaaaatctttggtaaaatcattcatgaaggagttcttctttctgtatgtgtttttttgttcaaaccaatcatacgagaaaggaactcctttttctaatgtttaaagaaataaatttaaggaatcattcatccttacacaaactattttacagtctcggatttttaagccgaaaaagataaaaagcacaaaaaatgattaatttttattaaaacaacggtgtcttactaaatttcgtagtaagataaattactgtaatgagaggagcagaagcgcgtggaacacactaaatctttttttaggtggctgacacagactaagttaggcttttttacgattgttttagtcttgttttggcttaaaacttattttatctatttaactaagtttaatttaggagcagttggtccaatgcagcaatttttattgctgattaatccgattccttcagggatgcttttgctgggaattgggctattttttaaaggacgtaaatcctattggattattttagttatcgattttttgctaacactgtggttatttgccaatattttatattatcgcgaattttcaaactttttgtcattttcaattattaagacatcaggctcgacttccgataatttgggtaaaagtattgcaggaattacactagctagcgattttttagcttttgctgatattgctgtaattatcgtgttattggcgaccaaagtaattaagatggatgttcgtccactgaagctaaaagttaatttgttaattgaggctttggctgtcagcttaatgggactgaatttattgatggcccaaaatgatcgttctggacttttgacgagaacttttgataataattacatcgtcaaatatctgggaatcaatgaatacgctatttatgatggctataagacagcacaaactagtgcacagatggccaaagctaatgtttctgatttgaagtctgttagaaactatttaaaagaaaattacgttaaacctaatcccgcttacaccggcgtggctaaaggaaaaaatgtgttaatcatccatttggaaagttttcaacaatttctgattggctacaaatggaaaggtaaagaggtaacgccaaatctgaataagatttatcatcaaaaagagaccattagttttgataatttctttaatcaagtaggacaaggcaagacttctgatgccgaaatgatgcttgaaaattctttatacggactacaatcaggtagtgcaatgtctacgtatggtacttctaatacttttgaaagtgctccagccattttgcatcaacaagctggttatactactgctgtaatgcatggtggtgctggctccttctggaatagaaataatgcttataagtcatttggctaccaatactttatgccactgtctttctatcagaacaaaccaagctactatatcggatatggcttaaaagataaaattttctttgatcagtcaatcaagtacattgagcgtttaccacaaccattttatttaaagatgattactgtaacgaaccactatccgtataatatcgataaaaagaatcagacgattgataaaacgaatactggggatgaaacagttgatggttatgtgcagaccgcgcattatttagaccaagcaattggtgaatttatgcgttggatgaagaagacgggcctagataagaagacactagtagtattttatggtgatcactatgggatttcaggtaatcaccataaggctagtgcagaattgcttaagaaagattcgtttaatgactttgataatttgcagttccagcgagttcctttgatgttccatatgaaaggactaaagggtggcattaatcacacctacggcggtgaaatcgatgttttaccaaccttactgaacttgctggggatcaaagacaaagatacgatccaatttggctatgacttgctaagcaaaaatgcaccgcaaattgtagcacaaagaaatggtgactttatcactccggaatattctaaggtgggtagcgattattatgacaccaagacgggcgaaaggatcaaacctaataagaaattaaaagaaaaattaactgcaatttctaacaccgtaactacacagctgtctttgtcagatcgtgtaattaatggcaatctgctccgattctataaaccaaaagggtttactagagtcaagccgaaggattacgactataacaaggcgccatctttaaaacgtttgtttgatgatccaagcaaaacttcactgtggtatcaaaatcatcgtaaaacgacgcaaaaagatttcaagacagatgcgcctgaactaaaaaaataactgcaaaaactagtaatttgtgataaacttggtaagtaaatcgtatgtgtgtattggaggcagcgcattgtataatttagttatgacgctactaatcattgtttcaatcttaattgtcattgcaacaatgatgcagccacaaaaacaacaagatgcattgaacgccttatctggcggtgccgtttttagtgggcaaaccaaaaaacgtggttttgaagcatttatggaaaaagtaacctcagttttattggtactctttttcgtctttgctattatcttagcttatatgtcttcaaaataaattttgtacctcccgatcaaaatatgatggggaggctttttttattaaatttaaagatcggagaataactgcatggcacaaaacgaaaaaattttggccggcgttttagaaatttttcgccataatccacaaaaacaatttcgtgtagatcaaattgaacgtgaagcacgtcgtgatagattaggtaattttactgaattaattaaggctctttcttttttagagcacgataaaaagattattacagatggcaaaggacaataccaattagctcaagaaaatactgaagttgaaggtgaatttagagctaatgataaaggctttggctttgttagattagatgatgaaaatgcggacgacgtctttgttgccgcagattataccaagtatgccgttaatggtgaccgagtaaaagtaaagatcactgctggtggtaatccttggaatggtaagggaccagaaggtcaagttgaagagatccttgaacatggtttggaaacgttagttggtgaatttcatccgctaactgatgaacaaagaaaaaacagtcattttatcggctatgctttgagtaacgataaaaagttgcataaataccgggtttatttgtctgaaaatggcttgatccctcaaatgggcgatatggttaaggtctcaattaaggattatccagatgaggaaaatcctgagtcaatgactggtgcagtagtcaacattattggtaataaaaatgaccctggtgttgacattatgtcaattgtggcagcacatgatgtaagaactgaatggcctgaagatgcaatggcgcaagctaatgctattcctgatcatgttactgaagaggaaaaaaagggtagagtagatattactgaccaacctgcagtcactatcgatggggatgattctaaggactttgacgatgctgtagttttatggaaaaagcctaacggcaattatcaccttggtgttcacattgcggacgtttctcactatgtgacagaaaatacgccgttgaacgaagaggcatttgctcgtggcaacagtacttacttagttgatcgggtaattccaatgctgccatttagactttctaatggaatttgttccttaaatgaaggcgtggaccggcttgttttgtcatgtgacatggaaattacgccagaaggtaaaagagtaggttataaaatttatccttctgttatgcgctcacatggtcgaatgacctacaacaaggttaacaaaactcttaagggcgaaatgaatggtttagaggataagtatgttaaactccgaccaatgcttgaagaaatggcagatttgcatgctgctttgtataaacaacgtcatcaacgtggtgctattgactttgaagaaccagaagcaaaaattattgttgatgatcaaggcaagccaacagatattgttttgcatgaacgtggtactgccgaaaagatgatcgaatcatttatgttaatggctaatgaaaccgtggccgaagatttcttcaaaaagcatgttccattcttgtaccgtgttcacgaaacaccagatgccgaaagaatcaagactttctttgaattttgtagcgcatttggcttgaatattcatgcggatccaaataacgttaagccaattgatttacaaaaagtagtttctaaaactacagatactccagaggaagctgtagtacaaatgatgatgctacgtagcttaaagcaagcgcattattcagaagaagcactgggacactttggcttagctgcagaatactatactcactttacttcaccaattagacgttattctgacttgatggtgcaccggatgatccatgcatatcaagaccaggggactaatgaagaagtgcaaaagcattttgctagttacttgccagatgttgcagaacaaacttcaacgcaagaaagacgttcaattgatactgaacgtgaagtaaatgacttgaagatgacagaatatatggccgatcaagtggggcaacactttgacgcggtagtatcttcggtaactagttttgggatgtttattcaattaccaaatacgattgagggattaatccatatttcgaatttgactgatgatttttacagttttaatgaaaaagcattgacgctaactggtcgaggtactcataagcaatataaggtagggatgccaattaaggtaaccttgattaatgctaacgttgaacaacatcagttagactttgaaatatatgatcctaatgcgcctaagcataagcataacgatcgcggaatgaataatcgtcgtcgtggaaaccgtggcttccgcaataatcatggacgccgtggtggtcagtttaataatcacagcgatcatggccgtggccgaggtaatggaaaccgtggaggtcggagaaattttaaacattagggattgatcttaatgaaaaaagaaaaagaagataatttaattgcacaaaataaaaaagcacgacacgactattttattaaggaaacattggaagcaggaattgctttaactggaaccgaaattaagtctgtacgagctagaagaatcaacttgcgggatggttatgtgcagatcgtcaacggacaagcctggctagaaaatgttcatattagtgaatataagcaaggcaatcggtacaatcatgagccactacgtagtcggcgccttcttttgcataaaaaagaaattgcacgtttggccaaagcacaatcagagcgtggtattgcaattattccacttaaagtgtatttaaaacatggctttgccaaggtattgattggtgttggccaaggtaaaaaggaatatgacaaacggcaaacaattaaagaaagagaccagaagcgcgatattcgacgcaagtatggtgtctaagatgagtctgagaagaatctcagactttttttgttgaaaaattttaaaaagttttttttattttcacaaagtaatgttcgaacaatttgaagaatgcagagaaaatcaagctaaatatttttttaattattatagaggcgaataatagtattaagatacgtttgatattgaaatattcatattaaaaatccgaacgaagagcaaaacttgccaaagcagagaaaataaggtaaattaataaagtcgcttcgagagatgcgacgagagcttaaaaacagacatgtaaggaaagaaaacaaataaaaagaaaaaagtacttgcaaagaagtaaataagctggtaatatatttaaatgtcgtcaggtgaaagcagaaaaagcttgagcaagacgaaaaaacaaatcaaaaaagttcttgacaaagaaatgatggtttgataaaatataaaagctgtctgctttgcaaaaaaagcaagacagaggtagtactttgaaaactgaacaaagtttcgctaaaagtgtgcgggtgtaaaaacccaaacaagaagcgaagtcaattcgcaagcaataaatttgagacaaagatcttaaataaggaatgagcaatcattcaaactttttaaaatgagagtttgatcctggctcaggacgaacgctggcggcgtgcctaatacatgcaagtcgagcgagcggaactaacagatttacttcggtaatgacgttaggaaagcgagcggcggatgggtgagtaacacgtgggggaacctgccccatagtctgggataccacttggaaacaggtgctaataccggataagaaagcagatcgcatgatcagcttttaaaaggcggcgtaagctgtcgctatgggatggccccgcggtgcattagctagttggtaaggtaaaggcttaccaaggcgatgatgcatagccgagttgagagactgatcggccacattgggactgagacacggcccaaactcctacgggaggcagcagtagggaatcttccacaatggacgcaagtctgatggagcaacgccgcgtgagtgaagaaggttttcggatcgtaaagctctgttgttggtgaagaaggatagaggtagtaactggcctttatttgacggtaatcaaccagaaagtcacggctaactacgtgccagcagccgcggtaatacgtaggtggcaagcgttgtccggatttattgggcgtaaagcgagcgcaggcggaagaataagtctgatgtgaaagccctcggcttaaccgaggaactgcatcggaaactgtttttcttgagtgcagaagaggagagtggaactccatgtgtagcggtggaatgcgtagatatatggaagaacaccagtggcgaaggcggctctctggtctgcaactgacgctgaggctcgaaagcatgggtagtgaacaggattagataccctggtagtccatgccgtaaacgatgagtgctaagtgttgggaggtttccgcctctcagtgctgcagctaacgcattaagcactccgcctggggagtacgaccgcaaggttgaaactcaaaggaattgacgggggcccgcacaagcggtggagcatgtggtttaattcgaagcaacgcgaagaaccttaccaggtcttgacatctagtgccatttgtagagatacaaagttcccttcggggacgctaagacaggtggtgcatggctgtcgtcagctcgtgtcgtgagatgttgggttaagtcccgcaacgagcgtaacccttgttattagttgccagcattaagttgggcactctaatgagactgccggtgacaaaccggaggaaggtggggatgacgtcaagtcatcatgccccttatgacctgggctacacacgtgctacaatgggcagtacaacgagaagcgagcctgcgaaggcaagcgaatctctgaaagctgttctcagttcggactgcagtctgcaactcgactgcacgaagctggaatcgctagtaatcgcggatcagcacgccgcggtgaatacgttcccgggccttgtacacaccgcccgtcacaccatgggagtctgcaatgcccaaagccggtggcctaaccttcgggaaggagccgtctaaggcagggcagatgactggggtgaagtcgtaacaaggtagccgtaggagaacctgcggctggatcacctcctttctaaggaagcgaaggatatggagagcaggaatgctaagagaagtatccagagcaagcggaagcacactgagaaactttgtttagttttgagggtagtacctcaaaaagagctagtacattgaaaactgaatataatccaagcaaaaaaaccgagacaatcaaagagaacagattgtagagcgaccgagaaaagaattcttgagtaaggtcaagtagaaaagggcgcacggtgaatgcctaggcactaacagccgaagaaggacgtgacgaactacgaaaagcttcggggagcggtaagtacgcagtgatccggagatatccgaatgggggaacccaatgcagagatgcattattgattagtgaatagatagctaatcaaaggaagacgcagtgaactgaaacatctaagtagctgcaggaagagaaagaaagatcgatttccttagtagcggcgagcgaagaggaaagagcccaaaccaagtgatttatcatttggggttgtaggactgcgacgtggcagtgtaagagatagttgaattatctgggaaggtaagccagagagggtgagagccccgtaagcgaaatctcaagcacgcctagcagaatcctgagtaggccgggacacgaggaatcccggttgaaaccgcgaggaccatctcgcaaggctaaatactagttagtgaccgatagtgaaccagtaccgtgagggaaaggtgaaaagaaccccggaaggggagtgaaaaagaacctgaaaccgtgtgtctacaagtagtcaaagcacattaaagtgcaatggcgtgccttttgtagaatgaaccggcgagttacgttatctagcgaggttaagtcagaaaagacggagccggagcgaaagcgagtcttaatagggcgaaaagttaggtgacgtagacccgaaaccaagtgacctacccatgaccaggctgaaggtgtggtaaaacgcactggagggccgaacccacgtaagttaaaaattgcggggatgagttgtgggtagcggtgaaattccaaacgaacttggagatagctggttctctccgaaatagctttagggctagcctcgtggagaggataatggaggtagagctctgtttggactaggggcccgtcaggggttactgaatccagataaactacgaattccagatatccatacacgggagtcagactgcgagtgataagatccgtagtcgaaagggaaacagcccagatcaccagttaaggtcccgaaatctatgctaagtggaaaaggatgtggagttgcgtagacaactaggacgttggctcagaagcagccatcattcaaagagtgcgtaatagctcactagtcgagtggcgctgcgccgaaaatttaccggggctaagcatagtaccgaaactgtggatgtgttttaaagagcacgtggtaggagagcgttctaagagcggagaagttgaatcgagaggatcaatggagcgcttagaagtgagaatgccggtatgagtagcgaaagataggtgagaatcctatccgccgaaagactaaggtttcctggggcaggctcgtccgcccagggtaagtcgggacctaaggcaaggccgagaggcgtagtcgatggataacaggtagagattcctgtactgtgtcaaatcgttaagagcgaaggagggacgcaggaggtgaagcacgcatcgcgatggaacgatgttcaagcaacaagtgcggttaagagtcaaatgcttctaaccagcaacacgagttgtgaagaggagtgaattaaaagtagcgaaggtgtggtaatcacactgccaagaaaagcttctagccagagatgacatacccgtaccgcaaaccgacacaggtagtcgagtggagaacactaaggtgagcgagagaactctcgttaaggaactcggcaaaatgaccccgtaacttaggaagaaggggtgctagccaagagattggttagccgcagtgaataggcccaaacaactgtttatcaaaaacacaggtctctgcaaaatcgtaagatgacgtatagaggctgacacctgcccggtgctggaaggttaagaggagagcttagcgtaagcgaaggtttgaattgaagccccagtaaacggcggccgtaactataacggtcctaaggtagcgaaattccttgtcgggtaagttccgacctgcacgaaaggtgtaatgatttgggcactgtctcaacgagagactcggtgaaattataatacccgtgaagatgcgggttacccgcgacaggacggaaagaccccatggagctttactgtagcttgatattgagtatcttttaaacatgtacaggataggtaggagccagagaagataggacgctagtcttattggaggcaatgttgggatactacccttgtttgaaggatgctctaacctcgacctgtaagccaggccagggacagtgtcaggtgggcagtttgactggggcggtcgcctcctaaagtgtaacggaggcgctcaaaggttccctcagaatggttggaaatcattcgcagagtgtaaaggtataagggagcttgactgcgagagagacaactcgagcaggtaggaaactaggacttagtgatctggtggtaccggatggaagggccatcactcaacggataaaagctaccctggggataacaggcttatctcccccaagagttcacatcgacggggaggtttggcacctcgatgtcggctcgtcgcatcctggggctgaagtcggtcccaagggttgggctgttcgcccattaaagcggcacgcgagctgggttcagaacgtcgtgagacagttcggtccctatccgtcgtgggcgtaggaaatttgagaggagctgtccttagtacgagaggaccgggatggacgcaccgctggtgtaccagttgttccgccaggagcatcgctgggtagctatgtgcggaaaggataagcgctgaaagcatctaagtgcgaagcccccctcaagatgagatttcctttgcgtaagcagtaagacacctcagagacgatgaggtagataggctgggagtggaagtcctgtgaaggatggagcggaccagtactaatcagtcgaggacttgaccaaagcgaagcaaactggaaggttttttgcgagaaggattatgtttagttttgagtgtaaaagctcaaaagagtacggtggcgaaagcaagaaggatacacctgttcccatgccgaacacagaagttaagcttcttaacgccgaaagtagttggtgggcaactgcctgcgaggaaaggaagctgccgtgctcttttttaatattccggcttagctcagttggtagagcgcttgactgttaatcaagatgtcgtcagttcgagtctgacagccggagtactttgtatggaatgttgtccgagcggcttaaggagcatgattggaaatcatgtatacgggtttatacctgtatcgagggttcaaatccctcacattccgtaattataagctcgtaagtgttgatcttacgggctttttgctttgcagaggtatccaaaaggtatctaactatgaaaaaaggacgaaatttttttaaatctcgtccagaatatttactatttgttgatcagatttttgctttagttcgtccagcatataagcataagtattagccgtgatgctcatatttgagtgccctaagcgtttacttattgaatataggctaacacccttaaatagtaacatagctacatgagtatgccttaaactgtgaaaatgaaagttctctttgctaatattaagctttttcaattgttttcgcaagaccttgtttacggcacttgaagttgggattttgccatcaggatcaataaaaagtcgttcatgattgttggactttaattggctgagaatatctaataaattctgatctaccttaataacacgagtagaagaacgatttttagtttctttgttaatctcatcggagtcataatcaattattttattattatcgtaatcccatgatttagaaatatgaatagtgtggtcgtcaaagtttatgtcatgccatgttaggactctgatttcaccaggacgcataccagtgtagatgatggttaagagcatatatctactaatatatgatggcttaataccgtctaagagtgattctttaagcttttgtacttgatcaaagttgagataatcaacttttctagtccgttcattattccaggttaaatttattctttcagcaaaattggttcttattaagccctcagctaaagcatctttaatgctgctattaatactgccattggttttataaacggtccctttaacgtgatttttaccatattgattcataaattcttggtattgatgtctagtaacttttgaaagtttagttttaccaaaatattcagttaagagcttataaatttgcttatatctattcttagtgccgttagttgtaccaggtgctttataagtttcataccaatctttaaaatattcagcaaaaatggggtcttgattagatatttgattatcatcttttgcaacttccatttcattagcccattttcttgctgcagatttggttagaaaccccctgttttactttaaaacaacgcttaccttgctcatcataccaagatacttgtgctcgccatttagtgcctcttttttcaaagtgtgccatcttatttacctcttaaatctaaattattcatatgttatttatgcattacgtataagttatttatatgctgcttatataaattgacccgtctactatagtgaagtaggcgggtatttttgatagttagtaatatttagtttggtcatagactcattcttcaaatttatatttacttagttcttcttgtacttgaaagtaatcctttgtcccgatactttgggcaaagtttagccaattagcggtttgaagatcattacctaacgcaaagtattgtttgactctttcatgtattaaaaaggaattagcactatgttcactacaagtgtgtgcgcagtcgtcgctttgataatcaccttgcacatccttgtcgtacatcatatgtcccagttcatgtagaattacatttttagcttgctcatcatcatagcttgagttaactatcatcacatcaggcttattatctttaccatgaacaagcaaacctgggcagtgtagaggagcaaattctaatcttatgtgtgattccttaagtattttttttagttcagtgtccataatgcacaccttttcctatttttcattgtaaattctctttagaatatctctgactaattctttatcgtggtcgtccattggtttgccatcgaagaatctagcattattaatcatgtcgtttaagtcagcattagtaatatctacatgattcgtattactaatatttagcagattatcagatgattgatgtaaagctaaggcaatacgtcttaattcatcacttgatacttttctagtgcccttttcaattttatttaaagctgttctttcaataccagcttttttagacaattctagttgactcatatttttagattcacggatattaacaatttttttggcaagtaattcttgttcattcatgtcttcacactttctattgcgcttttcgcaattaatatagcataaatcgcaacaaattagtcaaaaagtgctaaaaaagcaaaaaataagttgacattgctaaaatagcaatgtaatataatacatatagtgatggtgcgataatcgcaacagaaaggagaaaattttgaaacgtaaaatcaatttggctcttattcgtgagaaaagacttaagttaggatattctaacgaagatatggctaatagcctgggacttgcgagcccagataagtattttaggagggagcatggcacatataagttccaagcaacggagctaccagcactttcgaaaaaactgggaatcccattagaaaaaatttttgtttaacaagtgctaaattagcacatgatagaaaagtaggaattagaggatgaataaacaatttgaaggttcaaaagcttttttgaatattcctatcggaatttcacgagataaggagcttttaaaaaagccgaaaactattctacttatgggtgagatagtttccatgcttaatgtaacgggcgaattttttatgagtaacaaacaaatagcaaatcgcttagattgtactaaatctaccgttaatgattatctgaaaattttggaaaaaaaaggattaattaaacgaaaaacggttcgagatgaaaggacaggttcgattataggcagaaaaattagtgctggggactccctatctcaacatataggtatagggtggtctgatacatcggactaccctagtattccagctcgcactaccctatacccagctaccggtaataaatataacagagttaatagatcatctaatagaacagttaataattcttcttctaggaagaaagaagaagatccagaaagagaaaaaatctacaaagaatttttctttattgcaagaataaacgataaacgcaaaaatcaaacaactagaccatctcttgatgaaattaagcaaatgagaaagttgctatatgaatgtgatgttgacactctacgagctgtgaaggataaattcaaagagcgaatggagtgggacatggccggtaaaccatttgcatatttactcaaattgctaagagatggtttagcaaatgataaaaattatgaaagctggggatagcaatgactcgaaaacaaataacgctccgcatgtctaatgacctgtatgaaggtcttagacgattagcagagcgtaaacaaattagcattaataatttaattgttaatgtgctatggaaacaaattaagcattaatttttccatttttcttttcaaattgctgaacgtgtttgatgattaattgctcaatttctttattagcagaacgtccgttgtatgaagctatatatttaagctttttcatcaatgctgggtctactctcaaaccaaacataggtaatttagaagccaatttatgcacctccaatagtgttatcaatttgattacattttaacatcaaagaaacatataaaatgtccattggcaacaaagtgataacactttaatataattacaataggtgataacactatgacaacaccaaagaaaacgacaggcgtaagagtgcctatttatttggacgaagaattaaccaagttagcttcttatcgtggcataacgaaaaatagtttgatcgtgaccgcattatgggagtacttaaagaaagaaaaaggcaataacaatgactaagaaaagaaagactagtgaagcaaatcataaatttaaaggtgtttggatacctgctgagtattggctagataaagatctaactatcatggaggttgccttgattactgaaattgacagtcttgatggagaaaatggatgttttgctagtaataagctttttgctgatttcttgggaattacaccaggacgtgtatcacaattagtcaaaagcttaaaagaaaaaggctacatcaccactatatattcaacaaagaataacgttacgcaacgaactataagggtagttagtaaattaaatacccccgttaaaaaactaaataggggtattaagaatactaaaggggtatttaataaattatcaactagtaatatatctagtaacgcgtggtgctagttaaatcgttttagttaataaaaaaatccaatcttgttagactcgacttgtaaatagtaataatagaaaagagtctgatctgattgaactgccttaagcttaagcgttttagccaccatttacaagttagttttaaagatttagtgataatttgtcggcactggtatcgtttgtatgcaccggctgagtttactcatcggcgaaatattgatcaaattaaaactacggacagtctgattttggctttacttatctggcaagctaagacaggaattgaatcacaaagaagattctgtgaatgtttcaattgtttatcacactcacgttttaatcggcgttcacgtcagctattgcaattgatttatcagatacggcaagaaatgaataaaaaggttgacctgaatggacatttcttgatcattgacagctttccggtacctgtttgccaaccaattcgcaactatcgtgctaaaatttttcgcggttatgccaacattggttataaggccaccaagaaaatttacttctatggtttcaaagttcatgccattgttagcgatgacggttacattcttgattatgtcgtaacaaaagcatcagttcatgatgccaaggagacagttgaactgctggaaaatgcccatccatctaattactatcttcttggcgacgaaggctatttaggcaaagaactgcatcaacagctaaaacaaatgggttatgaactttggacaccatatcgtaaaaatatgacaggagctaaaaagcacaatgatcatcaattgatggctattcgcagaacaattgaaagcgacttttcgcttctgacctattacaatgccgagaacaatcgagcacgtagtctgataggctttcaaagccggttggaaattgcaattttagcttataatttggcttattgtctagaaagatttaactagcaccacgcgtatctagtaatacatttaatagtaatacagttagtaattcttcttctgcgaagaaagaagaagatccagaaagagaaaaaatctacaaagagttttttaccattgcaaggatgaacgataagctaaaaaatcattctaccaatccaacacttgatgagcttaaacagttacgggggctgttatatcaatgcaacgtagatactttgcaagcagttaaggataaattcaaggaaagaatgtcatgggacatggtaggcaaaccatatagctatttgttaaagatgctgagagatggcttagcaaatgatagaaattatgaaagctggggatagcaatgcaagaagatatgtctgacacattaatcaaccttccaagccttacgaatctaattaaaagtattgtaaaagaatctgttagtgcagataagcaagacttaactggcaagacttggaatatcgatgagtttagaaaatactgttgtcgtggcaaaggtgataactgggtaagaacttttattttcgatgaatttccagaagttgattataaaaatgatggattcgtagtaaaccccagaaaaacgccagctggtaaaactacaattatttttgctaaagaagcttgtgagtggatgcaaaaacatcaacacgagattgactggaatgcaaaaattaccagctaagataaaatgcaaaaacatgtaaacaaataacgctccacaaagagctatagatttaatcagttgggagaaataaatggaattaacaggtaaaaaagaaaattttgaaaagtttatattcaaagtagatgagttaggttacgctattgacgacttgttgccttctaattggatgctgaatttgaaagagtcctcacgtttattaagcgacattttaagcgataatcaccttaaagttaagcaagaaactaaaacaacgtcagataatcttgcaattcaaattaaaacaatcctagaagattcagatttgcaagtatcaactagctcagtaaccatgctagattcaaatgatcaagtcgaatacatacttaactggtggcaatggagaattaactgccagctagcactaattagtggaatttcaagcatgtatgaatctatcgaaaactagttagcattttttagtacagatttaatcaaagaaacaattaaatctgtttgttgatcagttaaatcaggtggtaaagtacccaatattttggtctgttgcggtgttaactcaacttcttgagaagtgtttactagagaactagcgctgacgttaaataaatcagctaatttagccgtattttccttgctaggggtatttacccctgctagccatttatagactgtaatgggctttatattaagtctgctagcaacttcttgaacagataagttactagtttgaattaactgtttaagatagtcagttctgaattttaaatctgggttatcagatttttcagctaattgagacaagaaatctttagtgggctgatatgaaggatcaagttcatcgggtgcaacatgcaaggctttagcgatcttaaccaagttgttttgtggtatggcaccatttcctaagtaataacgattaatcgaaggaatagagattccagttagcattgccaagtctcgttgagttagtttttgattatataaaatttttttgagattggcactagtaattgcgatgatggattgtttaagtttgtctttcatgatattgcccctttaaaaatttaaattttatgtagtaaatcattattaatatatcaattttacgatatttttgtataagatcacaagatattgataaagaaaacgagactgtaaaatagtttgtgtaaggatgaatgattccttaaatttatttctttaaacattagaaaaaggagtttctttctcgtatgattggtttgaacaaaaaaacacatacagaaagaagaactccttcatgaatgattttaccaaagattttgctcaagctctattcaatccagacaaaataaatgatttattgcgcaaagagctacaacaggctgttaataacttgttagaagctgaattgactgcctttctgggctatgatccctatgccagaaatggctggaatactggcaactctagaaatggtgcttatttccgcaaagttgatacgcaatttggcccaattgaagtgcaagtgccccgggatcgcaacggtcaatttcatcagcacacgctgcctggctacaagcagcactcggatatcttggaaagcatgattatcaagctttactccaagggcgtgaccaccagggaaatagccgatctaattgaaaagatgtatggcagccattacagtccagctcaggtatcaaatatttccaagcagatgattccaaaggttgaggcttaccacaaacgcaagctaagcgacaagtttttctgcgtctatttggatgcgacataccttcctttgcgccgagaaacatttgagcgtgaagcagtctatattgccattggcatcaagcctaatgggcacaaggaggtcattgactactgcattgcgcctagcgagaacattgaagtctggacagatatgcttcaaaacatgaaatcccgaggcttaaagcaagttgagctttttctttctgatggtgttgttggcatgaaaacagccttggccaggacttatcctaaagctcattttcaacgctgtttggttcatgtcatgcgcaatatctgcgctaaagtacgcgtcgatgatcgtgaaaagatcatgaacgaattcaaacaggtgcatcaacagacaaacaaagaagaagccacagctgtcctgcatgacttctataccaaatggggcaaggtttacagccatgttatcagaagcttgaaagacatagaaccagatctgctggtcttttataactatcccaagcagatcagagcttcaatttattcgactaacatgattgaatcatttaacaatgtgatcaagcgcaaagctaagcctaaggcagagtttccaactgaacagtcgcttgatgcttttattggcattcaggcaatgagctacaatgaccgttatttcaatcgaattcataaaggctttggtcaggttcaggacaccttagaatcctactttgattaaataaataattaaaaaatcaatttacgagaaagatctatttacacaaaagatttgacagtttccaattttaaatttaaattttcaccataatttaaaagtttagttccaaaataattatcatgataaaaagtatgatacagtagttaaaaagaagaaaaaagcaagagcttgctgattattcgtaggcttagaggttaaatctgatgtagcacgaaggcaatgattgttaacatgacactaggtttaattacgagtttccagctgcgttttgaacttttgaaataaaactgcatataacgttctcctttctgcaagtagttgccactacttgcttttttagcaaatttaataaaactcatataatttgcttattcataatgtatcccatttatcaatttttgctgagctagctccaaagaagataaaatgtaaattcttctttgtctttgaatggactctctcctataatttttggcttttaaagaacaattttgctaacaatcaggaaacttgttaaaaaaatctgatttatattgacatatcataaatatgatatacaatataaatataagttaaataacttatacatagcatataaattatggagggtatacatatgaaaaaagcttcaaaatttgataaaagctttttggcttggatgctagttgcacaagtggtagtaattattacttacttgtatcttgtttcaactggtttctttaatacattgccagtataaagtaatcataagcaaaacataaataacttatacatagtgtatgagtacagcaaggagaagaaaaaatgaagattattacttttgcagctatcaagggtggagttggcaaaactacactagcttataactatggtgaatggctagctaaccaaggatcacggattttgtttatcgacttagaccatcaatctaatttgacccaaacatatcaaatttatgataatgaatatacagtggggaatatttttctaaagaatgatcaggttaagatccatcagattaatgaaaatattgatctaattgcaggagatatgcacttagacgatattgaagcagacattgaaactaaggttgataaaaacatgctgttatacatgtggttagcagataattatgatactagaaaactagatcaatatgattacattattattgattgtcaccctgatttttcaattgcgacaaaaaacgcagtgattattagtgatgatattcttagccctattactccaagtgaacatggttatagtgctaaatttaatttagaagaacgctttaaggaacttaagcgagaaacaattgattatcgtacaagacagtcactagtagatgctaaattgttatttgttggaaatatgattaagaacaatactagatcatctcgcgaattagtagaagttctacagaaagatcccagtgtaattgtcaagattcctaatcgtgaattatttaaccgttccactttggataaagtggcaattagtacaatgatgaaagataagaaaatgcgatctaggtatggatcattttttaatgagctaaatggtatctttaactccattacaagtaacgtataaagtaaatatgtattacatatatgttaaggatacgtattatataaataaaacatgaggtgactttaatgaaagtgttcacaacaagtggcgtatatgaaatcaaagagcatagggtaaaaattttcccgagctattttgaagcacaagtaaataactctaaaaattttgaaattagaaaaaatgatcgtaattatcaagtaggtgatttacttcttgctagaagagtatgatccaacaacagaaaattacacagggcgtaaggttcattgcctgataacttatatgacgacttttaaacaagcgccaggatatgttgttttaggtaccaagaaattaggtacagtatagtaatgattaaggaggattttctatgagttttaacccaaatcaaggcaaaaagtttgcagaagtattgaaggaaacacctagagtcaatgatgactctagtaaggaagtgtcttctaaagaatcaagtaattatattaaaagagaaaagagaagaccttacacttttagtttgacgccaagtgcaagaactaaattgacagagattgcaaaggaacatggatatagttcatcttctagttttttgaacgatgtaattttgcaagataagttatagacagtaaattctgccagcttatattgataatttaaatatatgtaacatatatttaagctttatgtattgtcgtattaaaagtcatcctagaatcaagtttcatagaatggcttttttgtattggggactaaggcaaagcttctaagtctgaattttattattagccagggtatccaaaaaggtatccaacttcaaaattaattaaagccaaccaacatcaaaatggcttaatttcagtacttagaagtaattaaaagcaactaaaagtaaagatagctccctcacattccgtaaatatatatgaattggaactatgttaacatagttcctttttttctacctaatttttcatatataatggagaaagggaggaaatatcgtgaagctacgaaaactaattccatttctatttttaatatctctattagctataacattttccgcttgttcgacaaagggagaagagaatacgaaactgtcaaattttttgtgtaaatagatctttctcgtagattgattttttaattatttatttaatcaaagtaggattctaaggtgtcctgaacctgaccaaagcctttgtggattcgattgaaatagcgttcgttgtagctcattgcttgaatgccaataaaagtatcaagcgactgttcagttggaaactctgccttaggcttagctttgcgcttgatcacattgttaaatgattcaatcatgttagtcgaataaattgaagctctgatctgcttgggatagttataaaagaccagcagatctggttctatgtctttcaagcttctgataacatggctgtaaaccttgccccatttggtatagaagtcatgcaggacagctgtggcttcttctttgtttgtctgttgatgcacctgtttgaattcgttcatgatcttttcacgatcgtcgacgcgtactttagcgcagatattgcgcatgacatgaaccaaacagcgttgaaaatgagctttaggataagtcctggccaaggctgttttcatgccaacaacaccatcagaaagaaaaagctcaacttgctttaagcctcgggatttcatgttttgaagcatatctgtccagacttcaatgttctcgctaggcgcaatgcagtagtcaatgacctccttgtgcccattaggcttgatgccaatggcaatatagactgcttcacgctcaaatgtttctcggcgcaaaggaaggtatgtcgcatccaaatagacgcagaaaaacttgtcgcttagcttgcgtttgtggtaagcctcaacctttggaatcatctgcttggaaatatttgatacctgagctggactgtaatggctgccatacatcttttcaattagatcggctatttccctggtggtcacgcccttggagtaaagcttgataatcatgctttccaagatatccgagtgctgcttgtagtcaggcagcgtgtgctgatgaaattgaccgttgcgatcccggggcacttgcacttcaattgggccaaattgcgtatcaactttgcggaaataagcaccatttctagagttgccagtattccagccatttctggcatagggatcatagcccagaaaggcagtcaattcagcttctaacaagttattaacagcctgttgtagctctttgcgcaataaatcatttattttgtctggattgaatagagcttgagcaaaatctttggtaaaatcattcatgaaggagttcttctttctgtatgtgtttttttgttcaaaccaatcatacgagaaaggaactcctttttctaatgtttaaagaaataaatttaaggaatcattcatccttacacaaactattttacggtctcgagaatactgctaagcatagagttaatattgtaacttctactaatatttatgcagatattgctaaaaatatagttggtaaacatggtcatgtacaagctattataaaaaacggcgatacagatccacatgattttgagcctacgactggctctgccaaagaagtagctaatgctaatattgttattgccaacggtctaggatatgatgactggatgactaatttagccaatgctaatgatattcatgtggttaaagttggtaatcaattgatgggattaaaacagggggataatcctcatatttggtataacttaaacatgcctaaaaagtatgttgattatctagttaaaacagcaagtaaaattgatccaaaacatgcagcatattttaagtctaatgctgcaagctatttgcaaaagattgatagtataaagaaaattgctgctaaaattaatgggcgtgaagataaaccggtttatgttagtgagcccgtgtttgattatgcactagaacggtgtcattttaagattggcaatcaggcatttgaagaagctgtagaaaatgaaacggatccgagtgcgcaagttattcatgagatgcaagtcaaaattaaagctagaaaaattgctttctttgttaataatattcaagcatcaagtagtacagttagtggcatggttaaactagcagagcaacataatattccagttctcgatgtaagagaaacaatgcctaatggaattagttattattactggatgaaagcgaattatcaaaaattatttgaaattttttaaaataactattgcataattagggactatcaggtaatataataaacgttgtgattgagagatcacggtggtaataactaataaaaataaataaaaaaagttcttgacttttaaaacatgattagttattataataaagtgctcttgattaagagatatgacccgttggtcaagtggttaagacacggccctttcacggccgtaacatgggttcaaatcccgtacgggtcactaatggaggattagctcagctgggagagcatctgccttacaagcaggaggtcacaggttcgagccctgtatcctccattgttcgggactaccgccgcctcggtagtctttttttatgcaaaaagaacgaacaagcaaaattattattttatcggttcaagtcctgagaggattcactatgattagtgaagatgccttgtaaccgaatagccaatgtctatatagggggactaatatggaaagacgtttgtttacttcagaatcagtttctgaaggacatccggataaagttgctgatcagatttctgatgcaattttagatgcgatgttaaagaaggatcctaattcacacgtagcttgtgaaacgatcgtaactactgggatggtttttgtctttggtgaaatttctaccaacgcttatgttgatattcaagatgtagtgaggaagactattttgaagatcggctatgatcgtccagaattaggttttgatggcaataactgtgctgtgatggttgacatcgatgagcaatcacctgatattgctggtggggttgatcactcacttgaaactagagaaaacaagtctgataacgatgaattggatcaaattggtgctggtgaccaaggtttgatgtttggctttgcgattaaagagacacctgaactcatgccattaccaatttcgtttgctcatcgtttaatgagacgtgttgctgctttgagaaaagaccatactttagattggcttcgtccggatgctaaggctcaagttactgtagaatatgatgaaaataataagccattaagagtggatactattgttatctctactcaaactgatgcagaagtttctaatgaagaaatccatcgggcaatgattgatttagtcattaaggaagttattccggccaagtacctagatgaaaagactaagtttttgattaatccgtcagggcgttttgttattggaggtccaaagggcgattctggtttaactggtcgtaagattatcgttgatacttacggtggttacgctcgtcacggtggtggtgccttctcaggtaaggatcctacaaaggtggaccgttcagctagttatgcagctcgttatgtcgctaaaaatattgtggctgccggccttgcatatcgttgtgaagttcaacttgcttacgccatcggtgtggctcacccagtatcaatcatgatcgatactgccggcacaggtaaggttgacgatgaacttttaactgaagcagttcgcaacgtatttgatcttcgtccagccggcattattaagatgcttaacttgcgtcgtcctatctacgaacaaactgctgcatatggtcactttggcagaacagatgtcgatttaccatgggaaaagaccgataagactcaagatttgcttgattatattaaagatcatcaataaaaatattcgaggagtaaataataaatgaaaaaaacaaacgtgcctgtagtcacgcttgcgatttttatgacaacgtttatgaccgctattgaaggaacgatcgtttctactgcaatgcctacaatagtttcagaccttgatgggctagaaattatgaactgggttgtatcgatctttctgctgatgacggctgtttcgactcctttatacggaaaattggcggatagcattgggcggaagccagtttttttgtttggaattgcactttttgtcattggatcgtctttgtgtggcttagcgcaaaacatggttgaactgatattatttagagtaattcagggactaggttcaggagcggctcagccagttgcgatcaccattatcgctgacctttatactttgcaaaaacgcgctaaaatgttgggtcttagctctggtttctggggagtggcctcagttattgctccacttttaggtggttttattgtgcaacacctgtcttggcactgggtcttttatatcaatgtaccaataggaatcattgcgtttttattagtactagtgtatttgagagagcctaagcatagatctagttcaaaattggatttgcagggaacaatttggttagtattattgctttttgccttaatgttcttcttgcaggatcttggcagtagcatgaatttgctagttatggccactctagccgttttgattgtaatctctgtaattctattctttagagcagaaaaacgcgcagcggatccaataatgccgctctcgatgctgaaagacaaggaattctttgcattaaacattattacgctacttatttttggtgtagttattggatttgaattttatattccaacttggatgcaaggaattaatggtactaatgcctcacttgcaggatttgctgtaacgcctagttcattaatgtggattgtaggttcgttcttaattggcgggatgctaggccgctgggggattaaaaagacatatgattatatgttattggttttagttgtggccgatttggttttgattttagtgccgatttacacatcattctgggtcttctgtgttattgctgcctttaatgggaccgcctttggtgcgattacgacagcttcacaggtgagatcgcaggttttggtacctaaggatgacataggtgttgccacttcgtttaatacgctgatgaagtatctgggacagacaatgatggtttctatctacgggattgcttttaatacgatgttggcgcatgggttaagcaagagaccggggttgaatcaagaaatgatgaataaaattgtttctgcagaaaatgccaaaagtctggctgccaatgtagtgccacaattacggcaagttttgttaggcgggttaaaagctgtttacgttgtttctatgattgttattgtagtctcgattgtattgaatcaattgtatcgagatcgaaaattgaagaaaaattaagttgaaggagccacatgcaaagtagagcatgtggcttttttgtagaacttgtgattttataatttttaaaagaaaatatgaatttttaatttatataaaatacaaaatcaatattttgtaattaatattgaatttttatttcaaagagaatattatagttatgtaagggcttgcataaaaagccgtgaggtaaacaaatcaactattttctataaggagggtaagacgatggctgataaatattcagaattaggacgcgagatttatgcaaatatcggtggacctaataatgttaagtcaatgtatcattgcatgacacgcctaagaattaagatccgggataactctaaagtagatattcaaggcttgaaagatattgacggagttttaggcgtagtaaatgcggacacgttggaaattgtcctaggttctggggttaatgctaaagttgcacaagatatggttagccaagtgggagtgaaagaaaacgaagaattcccaaccagcacttaccagagcgaaaagtctgaagttcaagcaaaagctgcagaagtacatgctcaacataaggcacagttgaaacaaacatggtggcgtaaagctttaggccgtatttccgctatcttcattccacttattcctgcatttattggtgctggtttaatttcaggtgttgctggtatccttcgaaatatgttgacggctaagatgttgcctggtagctggaacttaggcgttactattctcagtatgattgctagtgcattgtttgcatatttgaacatttatgtaggtattaatactgctaaagaatttggagctactcctgctctaggtggtatcatcggcggtgttgttttgcttcctgggattgctgcaccggttactattccaaatgtattagatggtaagccgctagcagcaggccaaggtggtattattggtgttttacttgctgtatggcttttggcttatgtagaaaaatggttccataaacatattccagattccgtggatattatatttacgccgttctttactgtcctgattatgggactattcacagtatttgcaattatgccgattgctggttggatttctaattcattagtaggtggtattaattgggtgctcgatgttggtggtcctgttgctggattcatccttgggttgttcttcttaccaatggttatgctcggattacatcaaatccttacaccgatccatttatcaatgattcaaaaaatgggttatacaccattacttcctattctggcaatggctggtgctggtcaagttggtgctgcaattgccctttgggctaaatgtcgtaaaaacaaggatttagtaagattgattaaaggtgcgttacctgtaggtattttgggagttggtgaaccattaatttatggtgttactcttcctttaggtagaccatttattactgcctgtgttggtggtggtattggtggtgccgttgttgccgcatttggtcacgttggttcaattgctatcggtccttcaggtgttgctttaattccattaattgctaacaacatgtggtgggcatactgtattgggcttttatccgcatatgctggtggatttgttgcaacttatttctggggtgttcctaaagatgctattaaaggcaaagttgaaaatcctactcctgaagtttccgaaagaagagctgctgaaaagcatgctgataatttgaatatgcctagtgaaaaggctgaaatttcttttgaagctcctgtttcaggtgaattagaaaaaattgaagaagtaaaggatgacgttttttcacaaaagatgctaggtgatggctttgctattgatccttcaaatggtacagtggttgcgccagtagacggtaaaattgatacagtaatgaatactaaacatgcaattacattgaaaactagtaaagggaacttagatgttttaatgcatttaggattagatacagttgaattaaagggtgctccatttgaaattgacgttaaaccaggtgatctagttaatgctggtgaaaaaataggtacaatggatatcgctgcaattaaaaaggcaggaaaagacccagtggttttaactattattgctaatatggatcatattgatcaggtatcaaaagtagaagattcaccagttaaggcaggtcaagttgtctttaaggcaatgacaaaataatttttagaaagaaaatgatataaatgtcacttgaaaatttgactactgagcaacgaaataaaaatactatgcatattgattctatgtctacattagatatggtaaagacaatcaatgaagaggataaaaaagttgcagaagcagtaggaactcaagatgaagaaattgctcaagcgattgatattggctccgcacgttaccaacaaggcggcagattgatctatattggtgcaggaactagtggaagattaggtgttttagatgcggcggagcttgtcccaacctatggaattaaaccagaacgtgcaataggtttaattgctggcggtaaaggtgcaatgtatgtggctgtcgaaggagcagaagatgatcctaaattagcagctgaagaccttaaaaagcttgatttatcagaaaaagatgtagtgataggcttagcagctagtggtaggactccttatgtgattggtgggcttgattatgctcaaaaagttggtgcggctactattgcgattgcttgtgttaaacatagtttgattggtcaacatgcaaatattgcaattgaagctgttactggtgcagaagtaattacaggttctactagaatgaaggctggcactgcacaaaagatgattttaaatatgatttcaacagggattatgattcgccaaggtaaggtatatcaaaatgtaatgattgatgttttgccaacgaatgaaaagttagttgaacgtgctgaaagaatcattcaaactactacaaatgtttccttagaaaaagcagcaaaaattttgagggatgctgataaagatgttggtttagcaattgtaatggccaaaacgggtttgaaaaaaaatgatgcacaattgttgctgaaagaacatcagaataatgtaagtagtgtcttgaaagaagaatagatataaattaaggataaggaagagtggcagtaagtaatttaatttcgctgattgaagaaagaagacacattatgaatagcaagaagttaattactggaagttgtactgtagcattatcagtgatgatgttggcaagtactgttacatatgctcctattagtaactcacaggtgtatgcgagtgtggtaaaacaaaagcaagaaccaacaggtcaatatcaaattaatgatagttttcctattgatgaaaagaatgataatcccaaatttgatacttggtcattactagataatattaatcgaaagttttatggcttcaaaggtcaaggatcagtttgggtacacagtaataatgccaaaaattttgaattatatattaatgggaaaaatgttagtttaaaaaacattagtagtaataaatgggtaaaaattgatatcagtaaatttacaaaaaatggaaataatgctttacagatttcaccaaagaaaggtgttagagcaagcgataaatttgatattaaattaccttatcctacattagttgataaaactaaagaatatcggaataatgatacatttaaaactatggatgcactaattaattctgagattaagaatggatttccgtctgcagagttggttgttgtacataatggacaaatcattaagagaagtgcgtatggtagagtaaatgcatactttcaaaatggtaaacgccgtgttaatgctccaaaagttaccaatacaaccatgtatgatttagcttctaatactaaaatgtgggcaacaaatatggctatccagaagttggtttctgaaaagaaattaaatattgatgcaaaagtaagtagtatttttcctgactttaaagataatgctaatgataaaattaaaggcaagactgatttaactgtgcgtgatattttgatgcatcaagcaggttttccagccgatccacaatatcacaacaataactataatccggacaagcctaatgaacgaaagaagaatgccaaccctgtatatactcaaaatagagacgaagtattgaagaagataattgctactccattgcaatatgcgcctggaacaaaaacaatttattcagatgtagattatatgcttctggggttaataattgaaaaagtaacaggtcaacgagaagataattatgttgaaaataatatttataagccattaggcttgcgtcatttgatgtataacccattagataaaggcgtatctaaaaataaaattgcagccacagaattaaatggtaatactcgggatggacagattgattttaataatatacgtcactatacattgcaaggacaagttcatgatgaaaaagcatactatacaatgcatggagtaagcggtcatgcaggattgtttggcgatgcttcagatttagcggttttagcacaaatggtcattaatcgtggcggttatggtaatcacagaatatttgatgaagatactcttgatgaatttataaaacctaaatctacaaactatagttatggattaggttggagaagagaagcaagtactacttacagcggtaattatggatgggccttttcaggattgtccgatgcttcaactattggtcatacgggttggacaggtactttgaccgtagttgatccacacgataatactgcagttatcttgttaacaaatgaaagaaacactcctattcttaaacctgaaactactgctactgcaaatgactttgctggtggtcactatttgctatctaaatatggtgatattgccagtcttgcgttcgctgcaattaataaggacaattcatctgctaataatgccaagttaattagtcttacaatgcagagatttaacgaaattcaaaagaataaagatgatcaaacaaatgcagataaagcagacttatgtggaatttatgatgctttaaaaatgcgtagtaaaaagcataattctgtagcaagatttttagcgactacaaaaggaaagcaaattactgcatacgttaaggcaaataagaatgccgttaataatgttcgcaatagtcattaattaagaataaaagccattcaatatgaatgacttttattttattagggaggttagatgctaatgctaggaatatctgtatatttccaagattatgatgaaaactatttgaaaaaagcagctcaagctggtgcaaaatacgtttttacgtcacttcagattccagaagaagattattcagatctggatcaaaaattacctggattctttgaactgtgtaatgaattggggcttgaagtaattcccgatgtttctccagcaactttggaaaagctaggaattaaagaaggcgattttgaagctttaaaagataagggattcaaggctttaagattagattatggttttgataactttgatttaatcaaaaagctacaaaaaaaattctttattttattaaatgcaagtgttgtgtcactggattatttagatcgtgctagaaatgcaggagttgattttaataaattagctctaacgtacaatttctatccacatactgatacgggtatgggatggtcagattttaaacgtaaaaattggatgttgaaggattatggcttaaggactcaagcttttgttcctggggatgcacttaaacgtttcccactatatgaaggcttaccaactgtagaaaagcatcgtggagtttcaccttacgttgcagctgttgaattaattcatgaggcgaatgtagatgatgtgtttattggtgatagccaggcttcaatcaaaaatctccaatatattgtagattaccaaaaagagaagactttaaacttagaatgctctttattgccacagtatcaacaactgtatgatcaagtgatcgaagtaagaaaagatatgccagaaaagttgattcgattaagtttatctagaaagcctgatattccagtttgcaatactttaaataggcataggggtactattacaatgcaaaacaaattagctcaaagatatagtggtgaagttagtctgattaagtcaaatttacattttgaagcacgtagtaatgtaattggctttatttcacctgagtatgtgaagttgcttgattttattgattcgaatacaaaaattatttttagaaggctgacatagaagaaaggtgatattatgcttaatttggcgaataagatttcagatgtatatcctaatttgaataagacttctaagttaattgcagacgtttattttaaagaaccaagaatttttctaaataaaaatttacaggaattaggtaccattacccaaacgagtggtgcatcagtcgttcgcttttgcagaaatttgggctttaaaggttttaaggattttcaaatagcttgtgcgcaagaaatgcctaataaacaagatgctatggtagatacgattatcaatacaaatgatgaaccaacaagcgtgctttataaattgcaacttagcttaggaaaaaatattgcagacattggtaaaacaatagatcataaatctttagatgctgcagtagatttaatgcgatcagcacaacagatatatgttgcaggagaaggagcatctggtcttgctgctcaagatttgttttataaattaattcgtagcggaaagaatgttaatttcgttcaaagttcacatattgctttagaacaagtagcaaatattaataaagaagatatactaatcgttttttcctacagtggattaactcaagaaccattgctaatggcaaagcaggcgcaaaaaaataatgccaagatagttgcagtgactcgtatacaagattcaccactaaagaatatggctgatacagtaattacattgccatcaaatgagaagttattgcgctatggtgctattaattcactatttgcagaaatctttgcttctagcttgctatatttgagtcttatttcgccaaatttagaagaactaaatatgaaaatgaaaactacgcaaaatttgactaatcaattaaaagtgtagaatctataaaataacaactaaataaatttaaaaaaatcaaaaatattttcatgatgaaaataataaaaataaagaaaaaaaggaccagtttggtccttttttagtacttttttgcggttggaataaatctatatttgacaatgctataattataaatggaaagtggcctaaaaataagataacactattgaaagcgcattatttgcctccttgaaagtaaatctaagtagctgtacacttaaattgagctgaataacgaacgttatttttggcagagacttgtaatgcgagtaggaattatgggggcgtaaaaatggatattactagtttagcaagattccaatttgctatgacgacgatctttcactttttcttcgtgccattttcaattggtacgatattcgttgtcgcaattatggaatcaatgtatgttcatacaggcaagcctgaatataaaaagatgaccaagttttgggctaatatctttttattgagttttgccgttggtgttgtaaccggtatcattcaagaattccaatttggtatgaattggtccgattattctagattcatgggggacatctttggtgctccacttgcttttgaagcattgttgtcattctttattgaatctacctttattggtttgtggatgtttacttgggataaagtggggaagaaattacacttattctttggatggatgatcgtctttgggacaatgacttctgcattatggattttaacagcaaactccttcatgcagcatcccgtcggctttgctttacgcaacggtcgtgccgaaatggctgactttggagcacttcttaagaatccacaattaatgtatgaatatggtcacgtaattgttggtgcacttttaactggtactacaattttgactgggttagctgctttccaactattgaagaaacgtaacctttcagacattaacaagaagatctatcgtaagacaatgcgtttaggcttaatcttaatgttaattttctcagctggtgaaattgctgtgggtgatatgcaaatgcaatatactttgcatgatcaaccaatgaagttcgccgcaactgaagctgtttataagacaactggagaaaaggctccatggacggtagttgcaattgctaatccaaagacccatgaagttaagggaattgatattccagacatgttaagtattctttcttaccacaagactactggttctgtaaaaggtatggaagaaattaacaaagaacttgaaaagaagtatggtacacatattgatggtcgcaagatggactactatgtaccagttaatactttattctggtccttcagagtaatgtgtggttttgctgcattattattcttgatggcaattgttggtttaatcatgactcgtaagaataaagaaaccctttataaccatcgttggctattatggatcttcgcacttcttacattctcaccattcttggctaacactgccggttggttaattaccgaacttggccgtgctccatggacagtttatggattatttactattgatcaaagtgtttcaccgaatgtttcagtggcttcacttttaacatcaaatattgtttacttctgcttatttactattttagcaattatcatgattgcattggttgttcgcttcatgcacaacgatccagatgaatatgataaggctcaagaggcaagcaaagtagttgatccgttctcaaagggggccatctaaaatgtcatttttacaaatactttggtttatcttaattggagtattgttctcaggcttcttcttccttgatggttttgactttggggtaggaatggccgtgaagactttagctcataatgaacctgaaagagatcaagttgttaggacaatcggaccagtttgggatggtaatgaagtttggttgattactgctggtggtgcaatgtttgcatcattcccatactggtatgcaaccttattctcaggttactatttaattttattattgatcttagttggcttaattattcgtggtgtgtcatttgaatttagagcaaaatgtgctccatatcaaaagcatatttgggataatgcaatggcgatcggtagcgtaatagccacctttctctttggggtaatgtttatctcaatgattaaagggatgccaatcgatgctaaaggtaatatttcagctagcttctttgactactttaactggttctcaatcgttggtggtattgctttaacacttctttgctatttacacggcttaaactatattactattaaaactaagggcgttatttcagatagagcacaaaactatgcacaagctttatactgggtactctacgtcggtgaagtggtctttgctttattattgattttccaaaccgacttcatgagagtacatccaattgcaactttaatatgtttagtattaattgtcggcttctctgtggcagcacatgtagctacctttatcaataagcaaggaatggctttagcttgcagtggattaactctgatctcattggttgcattaatcttctgtggcttattcccaagagtaatgatttcatcaatcagtagcaagtatgatttgcttattcatagtgcatcatcatctaactacactttgattgttatgactgttgctacttgcatcttggtaccatgtatcttggcttacaccatctgggcatattggatttttcgcaagcggatttcaatgccaagaatcggagaggttaaataatgattgataaacagctatttaaaattgatggcgctggttcaatcttaaaaaaacttgcagggcttgagattctgcaagctttttttatagtaggacaagccttggcactagcgtcagtcttaagcaaattgtgggcaggtgagtcactagactggctattgcttcttacttttgcggcatgctttattgctcgccagttaatcaatactttgcgtgactcaatgcttgaaaaatattctggtcaagttgcagaagagctgagacagaaacttttagataaagtctttcgtgatggtcaggctttagtccaaaaacaaggtactggtagtttgatcaccatgtcgttagatggtgtagatgaagtaagacaatatatcaaactgatctatagtaaagttttgacaatgatgattgtgccagttttaatctttgtcggcatgctttttttaagctggacatcagctgtgattctgctagtcatgtatcctttaattgtcttattcatgattatcctaggtcatgctgcacaggatcgagcaattaaacaatttggtaactttcaggttttatctaataactttattgattctttaaggggaattgatacgctgaagtatttaggcctgagtaaaagatattccaagtcaatttttaacttgagtgagggttttagaaaaaagacgatggcggtgctaaaagtagcaatgctttcaacttttgccttagactttttcactaccttgtctattgcaatcattgctgtttttcttggttttgacttgatgaatggtaaaattgcactttttcctgctttaggaattctgattctggcgccagattattttttgccaattcgagattttgcgggggatttccatgcaaccttgaatggtaaaaatgcctttaagcggatcaacgaattgattaatctgccagaggaaaaaactaatgatttatctttaaaaacttggtcagctcaagatcaattgaagatcaagaacttgaagtttacttatcaaaagggaaccgaaattggaccggtttcattacaagtccaaggattcaagaaaattggcattatcggaatgagcggatctggtaaaactagtttaattaacctgctcagcggctttttgactccggatcaagtgcaaattgaactacaagggcagaaaactacgaccatgaatattcctgcttggcagcgtcaaatgacctatattccgcaggagccatacgtttttactaagagcttgcgtgaaaatattgctttttataatccgcaggcaagtgatgatgaaattaagcaggcgattcatatcatgggtctggatgccttgttaaatgatttgcctaacggacttgatacggtgattggccgcggtaagcgtgtcttgtctggaggtcagtcacaaagaattgccttagcgagagcatttttggatcctaagcgaaaaattatgatcttcgatgagccgactgctcacttagatatcgaaacagaaattgacttaaagaagcggatgatgccattaatgcaaaataaactggtcttctttgcgactcacagactgcattggttaaaagaaatggactatattctagtgatggatcacggtcaattggttgagcaaggaagttatgagcaattgcagcaaaatcaaggctacttctgcaagttaatggcaggaatgagaggtgaaaacaatgatcaataagattccggttttaagagcattaaaaaatgatcgttgggttcgcccatatttggaaaaatatcgtaaaacgttgattttggcgattgcactgggcattttaactttcgtctgtggcgggggcttgatgttctgtgctggctatttaatcagccgttcagcagctaaacctgaaaatattttgttaatctatgtgccaattgtcttaactagagcatttgggattacgcggccagctgtccgttattttgagcggctggttagtcacaattgggtgctcaaaatgacctccaaatttagacaacagctttatgactcattggagcgcgatgcgactatttttaatagtaagtatcagctaggaaatattctgggacttttgtctgatgatgtcagccatattcaaaacttttacctaagaacgatctttccaatgtttgtatcttggggcttgtatgcaattatcgtaattggcttaggcatcatttccccactgatgggcatttggatgttgatcctgtttttcttgattatttttgctattcctatttggtcagtcttaatcaatggtgcgcggcaaagctatgaaaaaacggttcaagacaagctctacgttgatttgactgataatgtgatgggagtagatgactggattttgtctggccgcagcaaagaatacttggccttgcacgtcaatgatcaagataaatttttgcaaatcaacgcgaagatgaaaaaatttgatcgctggcgcgactttgttttacaaatcttctgggtgttggtaattgtgagcctagtaatttggggtgctgccagatttggcgggcgttcaacttattatactaattggattgcggcatttgctttggcattattcccgactgttgaggcttttgccagtttgccgactgctgctcaagagacgaatatctacaaagattcgcttaagcgtttgaataatttgccagctcctgatcggactaagcataaaccaatcaaattaaccgcaccgtttaatttagtattaactgatgtgcattatgcctaccctcaaactaataaagaggttttgcatgggatcaacttaaatatccatgatggtgaaaagattgctattttgggtcgtagtggtgcgggtaaaagtactttagctgccttgctcagaggtgatcgggtaccagctaaaggacacgtaactttaaatggaattgataccagcaagtttggcgatcaaatgtccaattactttagcatcatcaatcaaacgccatatttgttcaataccacgattgccaataatttgcggctaggtaatgaagatgccacagatgagcagctatgggacgttttgcgccgagtaggtttggccgagatggtgcaaaaattaacggatggccttgatactaaggtggatgaggcaggattacgcttttcaggtggtgaacgccatcgtttagccttagcgcgaatcttactgaagaatacgccaattgtcttacttgatgagccaacagttggcttggatccaattacggagcaagctgtaattaatatgtttattaaggaattatccggtaaaactttaatttggattacacaccacttgcaaggaattgatcagatggatcaagtaatttttattgaagatggacaaattaatatgcagggtacaccggaaaaattatggcagacagagccgcgttatcgtgaattgaaaaaggctgatttaggattatagaggttcattatgctaacgaataaagtgccagaacaagatgtgcatgacctatttactagggtcgcacctaagtatgatttgatgaataatattgttagtttagggattcaaaagagttggcgtaagaaatttttacggcagttagatttaaataaaaattctatttgcttagatttgcgttgtggtagcgctgattcaactattgatttgactaaaaaagctaaattagtgactggtctagattttaaccaggagatgttgaagattgcccaaaaaaagattcgtcaaaagcagctgcagtccaagataaagttgattgcaggggatgcaatgaatttaccttttgcggccaatagctttgattgtgtaactatttgttttggcctgcgtaatgtccctgacgctgttaagacgattcaggaaagctaccgcgtacttaagccgggcggacaatttgctgttttagaaatgtctcagcccactaatgcattagttaaattgggctggcaagcttattttaaaatttttccgtattttgctaagttgacacacggtaatatcaaggactaccagtatttgtcaaaaacaagtaaagaatttctctcggctgagcaattaaaaaagctacttgagcaaaatggttttactcgagtagcggttactaagttaacttacggtgcaggtgcgattcatttgggacgcaaagactaaagcgttcgattgactaatttacgcgtcatctttttgagcaagacggtcgcattagtttgcggcagttgggctaagttagctaatgcccgattagtgtattgttcagctaaggcatgagtttcttcaatgactgagctgtttagcaaaatcttttggatttgttcgatatcgtttttgctcatttgtcgctttttttcaagtagcggtactaattgctctcgtaattcctttttgctaagagctagcagaataggtagagagtagacgccggtagtcaaatcttctagcgttggcttgtttagctgcttgccgccagtgtaatcaagaatgtcgtcaacaatttgaaaagcaatgcctaagttttcaccaaaggaggctaaagcttgagtagtttgctcatctccattgccaaaatggcttccttcttcggcagctaaacgaaaaagtgcagctgtctttcctttaacattagttaagtagtcgttgaaatcttggcttaggttaaaacgttcagccatttggcctaattcaccagcaagtaaatggtgcattgtgtgagcatttttgatcatgtaatcttgttcggaaatggcgttcaaaattaggtcaaaaaagtgcgtaaaaagcaagtcgccagcgtaaactgcggtgtctttgccaaaacgggcttggatgctaattttaccgcggcgctcgtcagaatcgtcaatgatatcatcatgaattaatgaggccatatgcaaaatttcgattgatgaggcaagttgaataatttgttttgatacagtttcttttttgctagcaatttgagctgacaaaattagtaaactaggccgtaaatatttaccaccgttactagccatttcaaggagtgcatcttgcaagtctgaatatggagtgcggatggttgcctgaattaattgattaacttcttcaagcggtttacgaataagtggatatttttgccaaggttgagagttattcatgatagatttccttataatagagttaacagaatagtgatcctttgaaaggatgtggatcgatgtcattaagtgtatttttagaattaattgagattaaagcaaaaaccgctagtgtcattccctttttcttagggatgtgctacagcgtgtattattatcaccaggttaactggggatttgccctagtcttcttcattgcaatgctactatttaacatggtagtagatatgtttgataactactgtgattattatcacgcagatagcaagaattaccaagagaagactaacattatcgggcgagaaaatatttcacctaatttagttctgggattaattatttcctttagtcttattgcaattttattaggtttgtatctagtcgctaaagtaggcttgcctgtattgtggatgggcttgttctgttttatggttggttatttatattcatttggtccgcatcctatttctagcttgccactaggtgaattgttctctggtttcacaatgggcttcatgattgtcctgctcagtgtttatatcaatagttttcaagtctttgcttggaactgggccacaatcgggcgcattttcttattagccttagcagatgaattatggatttctaatttaatgctagctaataatttatgcgatgcccaagaggacgaagataatcatcgcaccacgattattcattttattggtaaaaaaggtggcttgattgcttttagtgtcaaaaatgttttagcatttttggtaatcttcctcctaccgttcttgggaattgctcctaagacggtttggttaacagtaataattgtaccgttcgtttataagcagaacaagatcttaattggcaagcaagttaagacagagacatttatcacaggagtaaaaacgttgctagttggttcactgacttacttaataacttactttttaggaattctattttagagaggttgaaaattatgaaaacagttgtagttttaggtgctggttttgccggcttgaaaacagttgtcgctttgcaaaagaagttgcgtgaacaagttaagattatcttagttgaccgtaatccataccactacgaaacaattcgcttatatgaagtggctactggtgaaattccctacactgggatgtcatatgaaattaatgatgtaattaatccgaagatgactactgtgattacggatgaagttgaaaaagttaatattgctgataaaacagttgagttaaaggatcatgctccacttaaatatgactattgtgttgttggcttaggctttaccttgagcaatatgggcattaaaggtgcaaccgaaaatgctttgccaatgagcaatgtaaaacaagctgaagctattcgcgaccacctttatgccgaaatgaaggcttatcgccaagaccatgattctaaacacctgtcagtagtaatttgtggggcaggttttcaagcaattgaattaggaaatgccattgccaaggttcgcccagaactagctcaaatggctggcgcccaaccagatgaaattaccatcagaatgattgatggttcgccacgtcttttgccaatgttccaaggtaaattgcttgattacgctttaaacacaattaagaaaaataaagtcgaaattattaagccagcttatgttaatgaagtaacctctacctcggttttgtataaaatggctaatgaaaaagacaatgctgagctgcaagaaattaaggcaggtactagaatctggatgatgggctttagtggcagtccagtaattgaggcatctggatttaagaaccgtcgtggtcgggtcatggttggtgatcatttaacagcgccagaaagtgatgatatctacgtcttaggcgatgtttcaagcgtcatggttcctggtaagaaatggccatatcctaacactggtcaattggctctttcaatggctaactacgctgcaaaagatattaagagcagaattatgggtcaaactagaccggataactatgcttaccatgacttaggtgtagtagttaacttgggtaattcagaagccgcaggattggcaatggggcatgcttttaaaggatactttgcagcaactcttaagaagattaccattgataagtcggttcttgaaactggtggtattaaagaaacaatggcgattggtcaatttgacttctatcactaaaattgaaaataaaagagaataaaaaatcacttcagtttgatttgatatgaaccccaaatttgggacatattattgaactgctttatttaaaaccatatttcgatattctatcggagtatggtttttttagtactgttttaattctttcatgattgtagtaattgaatgtattaggactaaagtgtgaagttgcgccattttatgccacaccaagaagacctgctattcaccacactatgggtggcttagtaatcgacactaaggctcatgttttaaataaggacggtcaaatcatcgctggtctttattcagcgggtgaaaatgctggtggtatccatgccggtaaccgtttaggaggaaattctttagcagatatctttacctttggtagaattgctgccaatactgcttatgaggataaacatgttaccgatgttattactggcgcttcgcagaaataaagatagagtataaaaaaatacagatatatcaatttaaatattggtatgtctgtatttctatttggagtcatttttccttaccttcgaataaaaacccatgatttctaattcttactaacaaaaataatagtaacttttttctaacttcccaaaaaaattttgcgacttttttgcgtaataaataatagaggataaatatcatcaaattatttaaggagaactttgcatgagcaaagagaaagaactaaatgtgtctgaagcattaggttttacggatgatttgatgtttcagattgttatgagagatccagagatctgtcgtatgttcttgaatgaggttctaccacatttggacattcaagatatcactgtccgcacgcaagaaaggattgcttttaaccaagaagataaagtttcgattcttgatgtcctgattacggatagcagaggcaggcgttacaatgtggaaatgcaggtcgcgcataaagcagacatggataaacgagccaggcaatacctgttcaagatgatggaagatggctttttacgacgaaaacaagaatatggcgagctgcacgctgcatatgtaatttttattctgccgtttgatcccaaaggaaaaggcttgaagcgatatacttttgtttatactgctaaggaagacccatcagttgaattaaatgacgattctgcgttaatatatttaaacacaaagggaacaaaaggcgagatcagacctgagcttgatgacctttatcgcatgattgaaggcaagccaacttcaaatggaaaactcgtcagtcgaattaaaaagtcgatgaacaattatcgtagaaccgaagaatggaggcaacacgtcatgaacacagaagaagtagcagaagcagcaaagcagcttggcatggaagaaggcatgcatgaggcaactgttgcagcaatccataaaacgattaacatgcttagaaggatgaagtgcagtcccaagcaaatcttgcaagaattagaacaagattatggcaatgaattttctgaagaagaactagcagactttgtgaaaaacgcctagtcgataagatataatgatagctgtgaagctatcattttttagataacgggggcttgatcatgaataatcctgaagaattacaacattttttagatgttctgctaaaagagagtaactttaccagagcagctaaagaattatatatttcccagccttatttaacgcagctaattggacgaattgagaaaaaattaggcactaagatcatcaaccgagatgagagaccctatacgttaactcctgcaggtctaatttactatcaatatttggagaatgtttcatataataagcagcaattagggcgcaagctggaggcatatactcatcctgaccaacagataattaaaatcggcattttggagagcttaggtacatatttattgccagaaattttgccgcaatttttgcaagaaaaccccaacgtcaagattcagctatttgaaaatttccccagagaaaatgaaagaagactgcttaatggcgagctggattgttatattggtcagacgccagaagcacttgactcgagtttagatgtggttgtgggtggcgaggaacgctattacgtagtgatttcgccagcctcaccatattaccaagcaggaaagtttatcttaaattcggatgaacttgatctaaaagaggtactgcaggagcctttagtgttgagttcacctggttcagctatccggcatcaagttaatggcttatttcagagattaagactcgaaaaaaatattgtgatggagtctaatagtattattactgcaactaacttggcaattcacggcgtgggtattaccatttcttcggcaagtattatcagaagaatggaacaaacgccaattaacttgttgccactagatcgaaagttaatggatgttgtctttttcattgctagcaaaagcggggaaaagtcgccagcgttagaaaacctaatttcaatttttcaaaagacgcatttacaagcaaaaataggataaagaaaaaggcatcatgcgatgccttttaaattgctttgatttctattgttttcgtttcatgtcgatcatcttcggctcaatgtagaagtgatagaggaaggaataaccaagcagtacaaaggtaattccttcaatccaaccgccgaatacatcagatggatagtgcacgtggacgaaaattctggtgtaaccaatcatcagtgggaataaagcccaaataataatcaataaagtcttccagaatttgcttctcactaaaagaatggttaggataatcaaaacaccaaatagcgccgcgctaccaactgagtgccccgatggaaaactataaccatccgcataaactaagtgcttgaccgttggacgctgccgcattactgcgtgtttgataatccaattatagccattagcacagatcatgacaccagcggtaaaccaagcgtatgcatattgcttaaagatcagtaaaactatgaaaacaatgattgtttcaattgtgatcacgcttgtattgccgagattagtaaaatctttagcaaaagcgacattagctggattattgttgcaaacaatgttgatcacagcattatcaaaattgtgaataaattgtgagccggatgaaacaagtgcggcccagacagcataaataaccacgaagcagataccaggtattaaggtgtccttaggtggtcgtttcgtattaatcaaaaaagtactcccctcttgtattttttagcatttgtggtaaattataatcattatctataagaaaataaaggtcgagaagtagtaacaagaatattttttcagagagaggctggctgctgtgaagtcttaaaataggattatgaactcgtctcgtgttgaagaaacttagcgttgccatccgcgttaaggagcaattaagtgtcacaaattgtgaaacttaggtggtaccgcgatgattcgtcctatgattttttcatagggcgttttttaatagtaaaggagaattattttgtataaccacaaagtagttgaaaagaaatggcaagattattgggcaaagcatgatacttttaagacaggcactgaccctgataagaagaattattatgcattggatatgttcccattcccatctggtaagggacttcacgtaggtcacccagaaggatatactgcaactgatatcgtttcaagaatgaagcgtgcacaaggctataatgtgcttcacccaatgggctgggatgcatttggtttaccaactgaacaatatgcattgaagactggtgaagatccagaagttgttactaagaacaacattgctaactttaagcgtcaattgaacaagttgggcttctcatatgattgggaccgtgaagtaaccacttcagatccaaattactacaagtggacgcaatgggtttttgaacaaatgtataaaaagggcttggcatatgaagctgaagttcctgttaactggtcaccggacttaggtactgttgtggctaatgaagaagttatcgatggtaaaactgaacgtggtggctacccagtatatcgtaagaatatgcgtcaatggatgcttaagatgactgcatatgccgatcgcttattagaagaccttgatgatttggattggccagaaccagttaaggaaatgcagcgtaactggatcggtcgttctgaaggtgcgcaagttactttcaaggtaaaagacagcgacaagacttttgatgtctttactactcgtcctgatactttatttggtgttagctatacagttcttgcaccagaaagcaagcttgttcaagaaattaccacacctgaacaaaaagaagcagttgatgcttacattaagaaaattgaatctaagtctgatcttgaaagaactgatttgaacaaagataaaactggtgtcttcactggtgcctatgcaattaacccagttaatggcaaggaagtgccaatttggatttctgactacgttttagctagctacggcactggtgcagttatggctgttccagctcatgatgatcgtgactatgcttttgctactaagtttggtttgccagttaacccagttattgaaggtggcgatattgaaaaggaagccttcacaggtaatggcaagcacttcaattctgagttcttagacggcttggataatgaagaagctaaaaagcgcatgattgaatggcttgaagaccataactgtggtaagaagaaggttaactacaagttgcgtgactgggacttcagtcgtcaacgttactggggcgaaccaattcctgttattcactgggaagatggtactacttcattagttccagaagatcaattaccacttcgtttgccacatgcaactgatattaagccatcaggtacaccagaaagcccacttgctaacctaactgattgggtaaatgtagttgatgaaaatgggcgtaagggtaagcgtgaaaccaatactatgcctaactgggctggttcaagttggtactacttgcgttatgttgatccacataatgacaaagaattagctgactatgatcttttgaagaaatggcttccggttgacctttacattggtggggcagaacacgccgtacgtcacttgctctatgctagattctggcacaaggttctttacgacttgggtgttgtaccaaccaaggaaccattccaaagactttacaatcaaggtttgatcttaaagaaccatgaaaagatgtctaagtccaagggcaatgtggttaacccagatgacgtgattgatgaatacggtgcagattcacttagaatgtatgaaatgttcatgggtccacttgatgcatcaatcgactgggacgataatggtcctgcttcaactaagaagttcttggaccgtgtatggcgtctctttgtaaatgaccttgacttgaaggcaattccacaagaaagaatcgttgataagaacgacggtgaattagacaaggtttatgcagaaactgttaagaaggttactgaagactttgatgcattgcacttcaacactgcaatcagtcaaatgatggtctttatgaacgctgctcaaaaagctaaaactattccacgggaatatgcggaaggctttgtaaagctattagcaccagttgctccacacatgatggaagaaatctggcaagtctttggccatgacgaatcaattacctatgctaagtggccaacttacgatccagctaaattagttgaatcaactgttgaaattatggttcaagttaatggtaagcttcgtggtaagttccaagctcctaaggatgcagatcgtgatgatctccaaaaacaagcaatggaaatcgaacacgtcaagaagttcttagaaggtaaagacgtcaaaaaagttattgttgttccaaacaagatcgttaatatcgttgctaaataagttaaatttttcctaaaagaacagtagaactttactttattgttcaaattgcgtgacaattaattagttaatacttatattgggaaaaatttcatggaagaagaaaacaacttaaatagcaaagatacacaaaatacttttctaaaagggtctgcttggatgacctttggctcgattgcctcaagaattttgggtgctttgtatattattccgtggtatgcctggatgggaccctacggaaatattgcaaatgccttaactgcacgaagttataatatctacacgatttttattctaatttcaacggcaggaattccaggagcgattgctaagcaggttgccaaatataatgccttaaatgaatacggcattggacgaaaattattccgtaaaggtttaattttgatgactattttaggcatcgtctcggcggcaattatgtattttgcttcgccgctactagcgtctaatggtagtcagagtgatccgaggcaagttgcggttatgcggagcttgtcttatgcgattttaattattccgatcttaagtatcatgcggggttacttccagggatatgccgacatgatgccgagtgcgatgtcacaatttgtggagcagtttgcgcgggtagtctggatgctgttaaccgcatttgtgattatgcaaatgcagcacggttcctacgttcatgcagttattcaatctaatttggctgccgctgttggggcactttttggaattggattgctagtttggtttttgctttccagaagagagcgactggactacttggtggcccattcaaataatcgtttgcgagtttcaaccactgatttatttggtgaaattattgctcaagcaattccatttatcattattgattcgggaattaccttgttctcattggttgatcaatacacattccaccctatgattgctagcttagttcatgcaagctcagatacaatcgaagattggtacgctttatttggcttgaatgccaataaattaattatgatcatcgtctcattagctagtgctatggcggtaacagctattccgttactatcggctgcgcatactagaggagactacaagagtatttcaagtcagattgccaatacgatggacttgttcttgtttgtcatgattccagctgcctttgggatggcggcaattagtaaaccaatgtacacgattttttacggaccagatccattaggcagcaatgtcttatatatatctgcatttacggcgattagcttaggtttgtttacggtattaatggcaattttgcagggtttatcagaaaatggcttagcgattaaatatttgatcttaggcttgattctgaagggaattttacaatatccgatgatctttttattcaagatctacggtccgctagttgcgactaacttgggtttgttggtcattgtattcctatcactgaagcatttggaagttcaatataatttcaatttgaatcgaactagtcgtaggctaatgggagttaccgcattttcaatcgggatgttcctgattgtaaaattagtcgaaataggcttaggtaagttcttgagtccagagcgaagaattccggcattattcctggtaatcttttctgtgggagtgggcgtgatcttttatggtttcgtcaccttgaagacagatttagcacaaaagattcttggtagcaaaattgaaagtattttagtaaaatttcacatccatgactaaaaataaaagtcactacagatcaaaattatgatctatagtggcttttttagtgcgttggatcctgcgtgccaatccattactaataattttaggagtgctacttaaaatttaagaattagtcaggcgtaatcgccgttaaaacaaagaccccgattagttcaagtgctaagaatgtaataccgatagaagcaatcatgattctccatctcctcatcttagagataaatattgagatttatcttttctaatcacgtttattctttacgcttttactgtaacacataatctagtgaaacgaaagcggtttcatgaaagcaagagaaaaaagttgattcccgaagaaatcaactttgtgcccctgccaaggacctacattatagcattcatttattcttggttgtcgtcttttttttcgtcagaatctgaactagaatcatctgacttggtaaaatcaccgttcattgtattaggacgaccagtttgataatcagtagtgtgtttttcggctttaggtgcaatttggccaggttctggcatgaccattgcagcgatgatatataaagcaataccagggaagataccagtgaataaaattaaggcggcaccgatgattcttacccaagctgggtcaagatcgaagtaattggcgattccgcccaaaacgccagctaaaattttgttttgtgatttagtaagtctctttttcatagtaatcaactcatttctaaatttgatgtccttcaatgtgtattatacagcagagattaataaaattaagagctataaattctattattaaaaaataaaaaaagtgttgatctctcaacacttacacataattatgatgcccgctaaaggattcgaaccttcacttagtcacctaaacagcgacctgaacgctgcgcgtctgccaattccgccaagcgggcatttttattagctacatgaataataataccaaatatttggtaaaatgtaagcataaaatactttaattatacaaaaggatggaatttcatgttttttagtaaaaaaataaaacgtgtagcaattacaactgttgcagctgtatcaatcttttcgtgcggtgcagtttttgcgactacgcctgttaacgcagatacaactagtagctatcaagctgatcaagttaaactaaatgtaaagtcagcaattgcaattgatagtgattcaggtcaaattttgtatgccaaaaatgcgactaaaactttgccaattgcttcgatgactaaattagtaacagtttatttaactctgcaagcaataaaaaatcataagctttcatgggatcagaaagtaaagccaacggctccgatagtaaaggtagctaataatgcagaatattcgaatgtaccattaaaactaggacattcgtatacgataagacaactttatcaagcaaccttaattgaatcagctaatggtgccgctatgttgcttggtcaaactattgcgggctctcagaaggcctttgtggaccaaatgcgtgctcaagtgaagaagtggggcattgaagacactaagatttataccgcatgtggtttgcctaatggcaatgttggtaaagatgcatatcccggtgtaaataaaaacgcagaaaattctatgtcagccaaagatatggcaattgtagggcaaaatttaattaaagattttccggaagttttggatactaccaagttagctcacttagacttcaaagatgccggtcacgctaccaagatggctaacttcaactggatgttaaaaggtctttcacaatatgacccagcttatccagttgatggtttaaagaccgggactactgatgctgcaggggcttgttttatcggaactgtgcaacacaatggtgctcgtttgatcaccgtagtaatgggtgcacgtcaccgtgatggtactgacccagcaagatttatgcaaaccaagaagttaatgaactttatttttaccaaataccgtcctgttacgatgactgcaggtagccaaatgaatggtgccaaaactattaaggtaactgatggtgataacgcaacaactaacttgggtctaaagaacaagactactatttgggatccagcagatggcaaaactttggttgcatcattaaacaagaagacagttgaagccccaattaagaaggatcaaacaattggtgactatcaatttaaatctggtaatgaaaagattgtttcattgtctaatcctaatgggatgaacgtcaaggctaaggcattgtcagctaataacaaggtgaacttttttgtcagaatttggcgctggattttcggaggaagataaatatgactgaaatttctgaagatatcttgaaaaaggtaattaaagaaagagaaagcgatacacataaaggcgattacggtcgtgtactcttgatcggtggtagtgagaactatggtggcgctattattatgtctaccgaaggcgctattaatgctggcacaggtttgactgctgttgcaacacaccctttgaatttagcatcgctacatgcacgagtgcctgaagcaatgtttatcaactggcgtgatgctaagctagcagatttaattaaaaacacggacgtcgtaatttgcggtccagggttagggatgagtgatctcgctaaacaaattttagttatcttaagaagatgcacttcagaaaaacaaacagtcgtcttagatgccagtgctcttgatttaattagtcaggataagaacttattgccaactaatgctggccacttaatcttgacgccgcatcaaatggaatggcaacgattgagtcaaattcgtattccgtttcaaacagatagtgccaatattgatgctttaaaccaattgattccagatactaatgcgcttttagtactcaaatcgaatcatactcatgtttataatgggactggtcaaatttttgttaatccaattggcaatccaggcatggccactggtggaatgggtgatactttagcaggaatcatcggtgggatggttgctcaatttggcccaggcgttgaaaccgttcaatctgctgtctatcttcattctttagcaggtgacttgcttgccaaagataattatgtggtacgaccaacggaactttctaaagtattgcctaaattgatgaaaaagtattcagaattggcataaacatgttaaaattctaatagtaaataaatgcatccctagttgagggatgttttttaacgcttcaaagacgaaaaagcataatataattgagttaaatattaataaaaaagaagattaacatattcatgaaaaaaaacattattatcggcgtaactagtatcgttctagcttttggtgcaattatcggcttagctaaggtatgcgcacctaagtctgatgtctcacaagaagctgctacaacgcagactaaggccaaaactaagaaaataaataaaattaagaaaaaacaagctaaaaaagtagataatggtgctttatatcgaccatatagcgatcctaaggacttgcgcaaggcaggcacttggaagaaaaagagtgagcctaaaaaatatcctaagattaagccgtatgaaaaggatttgactttgcgggtatcattaaaaggaaaccggacctatttgttaagaaaaggcaaggttttgtataccatgttatcaactggtggaatctacaagaagggcaagtcattgaccccaactggaacttttaggatccaaaatggtcgtggagacagctttttcaattataacttaggtgaaggagctaataattggactagttggagtcctgataacgtgtacttgttccactctgtgccaactaaagctgattatagctataacttaaaagaagcagccaaattgggaagaactcaaggttcacatggttgtatccgtttgagtgtacctgattctaagtggattatggatcacatcccagatggtacgaaggtagtcattaaaaataattaacaagaacgttgctttttaagcaacgttttttaaaaaattgcagtaaaaaactttgttcaaagcgttcaagattttaatccaactcaagaatggcttttttaactaaattagtggcagaagccgttttttcctgctataatcatgtttgccaagaagtcaaaagtagtagttattttctttttaagcgagtctatgttggtgcaagatagatactagaagataatgaaggcgtgtttgactgataaaatcaagaatttaaataagcggatactttgtatcaatctgagtggtaccgcgggtttttaactcgtctctttctacatttgtagaaggagacttttttatttagaagagaggaataagatggactttaagaatgaagtagttgacttggttgctagtcaagttgatttacctaaagaaaaaattgctgcattaattgaacgccctaaaaatgctaagatgggagactatgctttcccagcatttattttggctaagactttgcacaaaaatcctgcagaaattgctaaaaatattgcggataacttatcaagtgataatttcgctaatatccaagcagtcggtccttacgttaactttgcgattgatcatgaaaaattagtttcatcgactttgaaggatgttttgactgaaaaagaacattatggtgatcaaaagattggtgaaggaaatgtgccaattgatatgtctagccctaacattgctaagccaatgtcaatgggccaccttcgttcaactgtaattggtaattcaattgctaagacaatggagaaggttggctatactcctattaaaatcaattacttaggtgactatggtactcaatttggtaagttgattgctgcctacaagcactggggtaatgaagaagacgttaaaaaagatccgattatgaatcttttccactactatgtaaagttccaccaagaagctgagaaaaatcccgaacttgataatgaaggtcgtgaatggttcaagaaacttgaagacggggatccagaagcagttaaactatggaaatggttccgtgaggtttcattaaaagacttcaagcgaatttataaagaactaggcgtaacttttgattcatacaatggtgaagctttctttaacgataagatgcaaccagtaattgatgaattaaaagaaaaaggtcttcttcatgaatcacgtggtgcgcaagttgttgacatgggtgaaggtgaaaatcctgctattatcgttaaatctgatggtacttcaatttacttaactcgtgacctcgccgctgctgaatggagaatgaaagaatataacttcgttaagatgctttatgttgtaggtaacgagcaagcccaacactttgttgaattgaagactgttttgaaaaagatgggttatgactgggctgatgaaattcaccacgtaccatttggtttaatcacccaaggtggtaaaaagttatctactagaaaaggtaacgttgtcttcctcgatcaagtattaaaggatgctgtttcacttgctaaaaaacaaattcaagaaaagaatccagatttagcagatcaagatcaagttgctcatgatgttggtattggtgccgttgtcttccacgatttgaagaatgatcgtttagacaattttgactttgacctagaagaagttgtgcgttttgaaggcgatactggtccttatgttcaatacactaatgctcgggcacaaagcgtcttacgtaaggccgctgcgatgggtgaaaatcctagcgaaactgatctagctcttgatgatgactgggcttttgccgtagccaaagatttagcagatttcccaagaattgtagctagaagtgccgaaaagtttgaaccttcagtaatagctaagtttgccttagatttagctaaaaaactcaataagtactatgctaatgtgaagattttaaccaaggacgataaaattggtgctcgtctcgccttagttcaagcaacatcaatcgttttaacggaatcacttagattgttaggtgtcaatgctcctaaagaaatgtaagagaaaaacaatgaaaataagaaaataacgcttacatttagtgaaagattgttcataattccagaattagggtacaatatgcatgtaagatatttaggaggtattttttaatggcttattttgacaacggtaatcaaatctttaaagatgctcgtaagaaccattacgctgtaggtgcttacaacactaacaacttggaatggactcgtgcagaattacgtgctgctgaagaaactagaactccattgttgatccaagtatcaactggtgctgctaagtacatgggtggttataagttcgttaaggacatggtagctgaccaaatggattcaatgaacatctcagttccagttatcttgaacttggaccacggtgactttgaatcagctaaggaatgtattgctcttggttactcatcagttatgtttgatggtcacgcacttccaactgatgaaaacttggctaagactaaggaaatcatcaagttagctcatgaacgtggtatttcagttgaagctgaaatcggtaagattggtgaaaaccaaggcggcggtgaattagcttctgttgaagatgctaagaagttcgttgcagctggcgttgacaagcttgcttgtggtattggtaacatccacggtgtttacccagcagactggaagggcttgaacttcgaccgtcttaaggaaattgctgaagcagttcctgacactccacttgtacttcacggtggttcaggtattcctgaagaccaagttaagaaggctattaagcttggtattgctaagataaacatcaacactgaattccaattagcattccaagaagctactcgtaagtacatcgaagacgaaaaggaccttgacaagaaggctaagggttacgacccacgtaagttgttattgccaggtgcagaagcaattaccgccaagatgaaggaaatgatttcttggatgggtaccaagactatcgatgacgaacttaaggatgcttcattcgaccgttcatcattgaacgaagaataatcatttgataattatttaaataaagtctagcgtttgctaggctttatttttttaggcaaatttggtgataacttaattgaacctattataaaagaaatataaaataaaaaattgaattataaagaaagtataaaaagagacttttatggaagaaaaaatgttaaatccatttatgcctagctttggtcgttttcctaaaattattattgatcagcaagaggcattaactgattacttaactggcttacaaacgcacgatgctaagtatcaaacttctttagtctatggcacaaggggatctggaaaaactgtttttcttttaaatgtgcagagatctttagcaaagctagataattggatatttattcgtttaaataatggtcaaggaaatttgctttttcaattaatgcatggtttgcaacgagttgcaggtatttcgttagttgacttgttaaaaagtgttaaaagtttgaatattatgggaaagggaattacttggcaagcactacaagaatcacagcaaattgattatgatgagtatatttcaattttgctaagtcgattaaagaaacaggggaaatcaattttaatcggaatagatgaaattgaaattagtgatgatgttcgagcttttggatcagaatatcaaacattgattggtgatgaataagatatttcattattgatgacaggattgccaagcagaatatccgaagtacagtatgataataccctcacgtttttactacgtagtaatcgtgtttatttatcaccgttggataaaaaaacaatagctaatagctatgagaaagcatttactaaaggaaaacgtgaaattgatttcatggtattggatgaaatgagccgtgcagttaaaggctatgcttatgcctttcaaacgattggttattatgcttggcgatttagtcgggaattattgcagttaaacgaagaagttttgaaacaaacaattcgagctgcaaaaaaggacctttttaggaatgcctatgaaagaatgtatatggatctttccaaaaatgatcgcgattttatcgaagcaataatcaaagctggaaccgatcgtgtcacgacaaaacaattgcaagatatcttaaacaagccgattaattacatttcggtatatcgagcaaggctgttagatgaccaattgattacatcccctcaaagaggagtagtacaattggcgttgccattttttgcagagtttgttgaaaaatctaatttagaacatttatcttagaaaatgagcaaatataataaattatggcaatatatcaaagataataaggctggggactttgagctttcttttgatgagcttggccagcaggctggggttgccttagatcattcctttttgcgttataaaaaagaattaccagcttatggctttgaggtgcaaaaaatttcattgaagaataaagtggtgaagtttcatcagttgtaatgaaagctattaataactaaagtagtagtttgcgataatatcttcaaaattagtaactatgttttgttttagaaaaagactaagatgtaagtaaaaaatgggaggattaataagttactatgaagaaggttttatcttggccagtatattatcaactatcagagatttatacggcgccattaaatgtaatttggtttgtctttggcgcggcaatgtcgtttcaacaatatcacatgtttaatttgattaacattttactgtgcttagtagatgtttttctgtttgatttagcagttaatattgctgataattactatgattatcttcatggcaaagatcgacattttttgactgatataaatccaattggtcgtctgaagttacctttaactgatgttagaaacttagtgtggattagttactttatttcggcgattccgggtattattttggtttatcgcaccggctggccagtactaataatgggagttgtaggatatttcattggaatattttacactgcgggtcctaagccactgaatgcaacaccgatctgtgaattagtggtatctttttttatttcgtatttcattatgctagtaagcatctatgtcacaatttacggcacttatcctttgacctggaacttagcattaactactctgataagatgtttgcctttaacactcattttctatgctttgcagttagctaataatacttgtgatttgcatgaagatttaaacaatgggcgccatactttagccagttatactggtaaaaaatatgctcttaaaataattaagacgttgattattgcgggattattatttccaattatcgttgttctttttggtttagcaaaatggccattgatctttagttgttttttgttgccaatattatggcaaaaattaaaacaattttttgagcatccggataaacaaactacctatttacaaatgattaagtatttatcaatatttttcattacatatatagctatttatacagttttggtggagactgtaaaatagtttgtgtaaggatgaatgattccttaaatttatttctttaaacattagaaaaaggagttcctttctcgtatgattggtttgaacaaaaaaacacatacagaaagaagaactccttcatgaatgattttaccaaagattttgctcaagctctattcaatccagacaaaataaatgatttattgtgcaaagagctacaacaggctgttaataacttgttagaagctgaattgactgcctttctgggctatgatccctatgccagaaatggctggaatactggcaactctagaaatggtgcttatttccgcaaagttgatacgcaatttggcccaattgaagggcaagtgcctcgggatcgcaacggtcaatttcatcagcacacgctgcctgactacaagcagcactcggatatcttggaaagcatgattatcaagctttactccaagggcgtgaccaccagggaaatagccgatctaattgaaaagatgtatggcagccattacagtccagctcaggtatcaaatatttccaagcagatgattccaaaggttgaggcttaccacaaacgcaagctaagcgacaagtttttctgcgtctatttggatgcgacataccttcctttgcgccgagaaacgtttgagcgtgaagcagtctatattgccattggcatcaagcctaatgggcacaaggaggtcattgactactgcattgcacctagcgagaacattgaagtctggacagatatgcttcaaaacatgaaatcccgaggcttaaagcaagttgagctttttctttctgatggtgttgttggcatgaaaacagccttggccaggacttatcctaaagctcattttcaacgctgtttggttcatgtcatgcgcaatatctgcgctaaagtacgcgtcgacgatcgtgaaaagatcatgaacgaattcaaacaggtgcatcaacagacaaacaaagaagaagccacagctgtcctgcatgacttctataccaaatggggcaaggtttacagccatgttatcagaagcttgaaagacatagaaccagatctgctggtcttttataactatcccaagcagatcagagcttcaatttattcgactaacatgattgaatcatttaacaatgtgatcaagcgcaaagctaagcctaaggcagaatttccaactgaacagtcgcttgatgtatttattggcatccaggcaatgagctacaatgaccgctatttcgaccgaattcataaaggctttggtcaggttcaggataccttagaatcttattttgaataaataattaaaaaatcaatttgcgagaaagaactatttacacaaaagatttgacagtttccaggattgcattactatagtttatgtaagttatgaataggtagtaagtaacttatgaatttcaagatattcattgatttaatgaggagaacgaaaatgaaaattttcaacaagaaaaacttattattgtcatctgcagttgttgcagggatgctattcacagttggtactaaggctgttcaagctgatacaaccgatagttcacaacaagcaactacaaatactttaaaggtaaatgcaaatactgcagttccagataagaatttgattacgccagtagctagccgtgataatcaaactcttcgtcaagttgcagaagcaaacaacacttcattaagtgtattggaaaagttgaatgataatattgatccagataaaaccattgctaatggcacgccattatatcttccacaaaatgaagatttgtcaggactatttggtatatatcttagatcagatacttcagttccaagctcattaaagagaaaatattatgatagtctttcagcaaaagagagagctgctaagatgtggattattgcacgtgaatctggtggaaattacaatgcaagaaatggtatctatattgggcgttttcaattaacaaatacttatttaaacggaaattatagcaaagcaaatcaagaaaaaacagccttacgatatgttaagggacgttatggttcatggtcggcggctaaaagattttggcaggctcacaactggtattaataaataaacggaaagtggaaaaaatgaaatttcaaaaattagtaactagtgtattattagtagctagtaccactggtgtattaatgactgcacctaaacgggttcaagctgtagctgataccaatactactgagagtggaaaacccgtcgcaaatattgttaataagcctaacctaacaaaacaaggttatgtgttaactattcaagccccatcagggaagatttatgtagggcaaaagaattacaagaaacaattaactactactaagccaatatctaacgcaaaatcagttagttggaagaaaattaaaaacgttagatttagaattgaaaaagttgcttatgcgacaaaggttataaaatttggtggagcaccacagtatctgcttgtctctaaagataaaaaatatagttgctggacaacgcgttattctattaaatactatttttggaatactaaaaagatgcaacaagtaattaagccattgtctaaattgacaactagaaactcttcaagcctaaagaagattcggaataagcaagattttaatcaagctgtattagctgctaaaagattacctgctaatcaaagaaaagttgtcttagaatctttgaatcaagtgaaaaaagttggcaatattgataaggctgaagataatattttgttgttcagcttttagtgatatttctagcacagatttaaaattaatataaaactgaagttagaagaatttatttaatgttgagggggaagaaattgtgagaagtatatctaaaggcattgtatctttgatagcagctacaatgttattagcagcaggggaagggatagttcctaatactgttaatgcttctatgctagattcggctaaaagtagccagaatagtcaagaaagtagtagatacacttggcagagtgttaagctaacagatggaactgaaatgcaaattcttccagataattcttcaaaattagctggaaagattaaatataacggtcaaatatattcatatcgcattgtttcaaataatggtgtatatactatttatttgaataatgaggaagtatattcagttgatataaataatagccagttacctacgacaagtgtaggtggttttgatccatttattaattttacgtacgcaaatggtaaggtagcatttaaacatgcaggtagaaagtattattatttgacgacagagaaatatagtgcagatacggtaagaagactgaaaggaactactaaggatattattattggtttgcttggatttgttcctgtagttggcccctatgtttctgccggcggttttgcctatactgtttataatgatatttttggaaagaatcctaaaaataaatggtatacgataaaagaatattgcactagagggtatgaatattatgcttggaagacctatacttatactgactctcatagaaaacatctacaatctgttaaatgggagtataaaaaagtattatgagaggaattttaactagtagagttgctagaggcatattagcgtttatatttatattttttacgggttggtctgctgcaagattaatagtacagatagaacgttctgaatcgatatatgactaccttattttgggaggatttagtctagttttaggtattttggaactctatagattaataaatagtaagtaacctgaaaattttagaaaattgaacgttaacgtgaatatcaatataacacgcttagcttaaatagtcttattacttaaacttcccacacgcaaaattgcttgtttcattgtgattctgcgtgttttgacaaatataaaaggcacaagtccttttcattgctataattatattgaccaaaacataatttatttgcatgaaaggcttgtgccaatgtctattttaccatctcctgaccaacaaaatgaacaactattttcaaactcaatcatcagcttcatcaagaagtttcaggtgatcaagctgttgagaaaatgtggcttccgcaaggaaaaaggcattagcctgttcagcttgtttctttacgttttaagcaatgtctttcgtgaccgcagcttatatatgcagctgaaaatggatcattttcaagaaaatttttccaagaactcatattaccgttttatgcgcaacgttcacgtcaattggctccacttcaccacacttctgtctgcgcaaatcattaataaccacttgcgatctttgacttcagaaaaacgggctgattgctttgttgtcgatgattcctacttctctaggaccggcttcaagaaaacagaattagtcgccaaagtttttgaccatgtatcaatgacttacaagaaaggttttcgcatgatgaccctgggctggactgatggagcttctttcatgccaatcaattcagtgctgctgtcttctcagaagctacagaatatgattggcgaaaataaagtttttgatcagcgcaccattgctggccaaagacgtatgcttgcccggactaaaggcacagacgtgatggttaatttaatcgaccaagctatgaaagcaggtcatcaagccaagtacgtgctgtttgacagctggttctcaaatccacatcaaatcgtccagctcaagcaaaggaagctggatgtgattgccatggttaaggttagctccaaaatcaaatatgaatttgagggagaacgcaaaaacatcaaacagatttatcgcagctgtaaaaagcgatgcggccgttctcgctacctgctgtcaatcccagtcaaagtcggacgccaggacaaagacggtgctaaaatagatgcacggattgtctgcgttagaaaccgtgccaatcgcaaggattggctggcaatcatttgtaccgacatgtcgcttagcgaagatgaaattatccgcaactacggcaagcgttgggatattgaggtttttttcaaaacttgcaaaagttatctaaaactaagtacggaatatcatggcctgtcttacgatgctttgaccgctcatgttgccatagtttttactcgctacatgcttatgtcagttgccaagcgggacgatgaagatgaacgcacgctaggcgagctgttctattgcatgattgatgagctggcggacattacttttagccattccttgcaattgattactgatgcaatgctggccagcgtaaagcaagtctttcatgccagtgaagcacaaatagctgaattcacggctgactttatcaatcgtttacccaaatacatgcaaaaattgttaaagaaaactagcaaaaataatatagaagcctaaagccaagcaagatcaagagattactggcttatttagtgtgggaagtttaagttattagtttttataattcagtaagataatcggcaaaatggtaatatttagttgtagtcgcttcaaaggataaaaagtattcaacttggattactcaagctttcttgcaatactactacctaaacagcaagtctatgcaaggtgtgattaagccactcaagcgaattgctaatagattaaataccagtctgaagaaggcaaacaacaaacgtgactttaacgctgcaatgaaagctgctaagaagttacgtggcagtcaaagagattttgttttacgttcattgaatcaacttaagaaggatggctccatgaatgtagaaggaaagaacttgttattgtttggcttataaaattaagatattaagtagtaaagctcagcagaattactgagctttatttttttgtgaacggtagtcggcaaacagtataataaacttataccaaaaacattgaagtggattatatttagaaaagaagatggaaaatggctaaaaagttacgcacgcttggtattagcgattttgtcggcagggatgctctcatttttaggaatattggatgaaacagccacgacagttacttttccaacgttaattaaagaattttcgattaccactgatcaagttcagtgggtaaacacactagtcttattggtaattgcgactatcgtaccgattagttcacagattagattaagaatttcgactaagaaaatttttattctaggagttcttttgtttactttggggctaatcatcgatattttatcaccgcgctttgatttattgttattaggacgggcaatgcaaggagtcggcacggggattggcttaccgttaatgtacaatattatcttggctgaagtacctaaagaaaaactaggctttatgatgggaatcggcactatgattactgcctgtgccgttgccttagggccagtttttggcggaatgattaccgatgcacttaattggcgctggatcttcattatttcgctatttttaatgaaaaacgcccggaaattccccgtattttaatgcggggatggatagggccaagctgacctaatggtcagctttttttattaaaaaatgaagacatatgttcgactttcctgtaaaatataaatatctaatctacagaaggaggtgaaacacatgaagagaatgagcagtttagcctaccattttggcttgaaagtacgcttttatcctagttctaaacaaaagaaaatcatcaagctaaattatgatgctcagcgttttgtctacaactcttatgtaggacgtaatcggaacaattatcgggctaagggctacttagctgttagacaatatcaagtaatgccttttgccttttctgttcttaataattatgagactaagctagcagaagaagtagtcgccaataatgagttattggctaagccaaagaacattcgcgatgcttatagctttttacgcgttaaagaaattgacagtctcgctattgccaatgcgattcaaaactatcagaaagcttggaacaactatcgcaagcttggtcatggaattccgacttttcacaaaaaacgtagtgattggtcatatcagaccaactgtcagtatcctaaacagacagaagcctttcttgataacgggacagctagatttattgatgctaagcacgttaaattgcctaagctaggcgttgtccgcattgccagctttagaaaattgattaaagagcgttttcttaatcatatcccaactagaattggcacagtcacgattaaaaagaccgctgacgaccagttttacttatcaatgcaactaggcagcgatattgcctttgttaaggaattgcctaagacgcagagtaaaattggcatcgacctcaatcttgataatttcttaacagcatctaacggagcaatggtggctaatccacgattttatcgcaaaaccaaaaagaagcttgcccatgcccaacgtgtcttgtctcgcaggcagcgcagagctaagaaagagggacgcaatttgcgcttagccaagaattatcaaaaacagcgtctagcagtcgctaaactgcacgataagattcgcagacagcgaaatgacttcttgcaagtactctcaactgcactaatcaaaaaccacgatttagtagttgccgaggaattaagaagcaagaacctgttaaagaatcatgccttgtctcaagctatttctgatgttggctggcgcagttttctgaacatgctggcatataaggcagacctatatggcaaagagttcaaaacaattgatcctaagtacaccacccaaagatgccatcaatgtggcagtattatgggacaaaacggttataagaaattaacgcttaaggatcgagaatggacttgtccaatctgtcaaacgcatcatatccgtgattggaatgcggcagtaaacatcttagaaaaaggcttaggcaactggcagaattctaaaataaaaaaagcagcctaagctaggctgcagtccgctagcaactcgcggactcaaaaggctttggtaattagacgacctctatcggcaatagtcaaaagattattgttggtaagtcaagtccgtatctaagcaagttggtgttctggttagcgcaagctaacgagccagccaccaagccccagaatttattctggggtagttgacttatcttgagtctatttacgggaagctattcaattcggcagattaatccgcttgaaaaagtgaagttcaagtatgtgcaatggctatctttggctattgggctggtctgtttaatgctgggctttacgcggattgctaaatattcatttttctcaatccgagtttggggcttcttaatcttaggaattattagtttattaatttggctcaaaatatcttggtccgataaagcagcattgattagtccgcaactgtttaaaaatttacgttttagcatgcagttaatagcttattgctttgccaaaattgcgacgctagctttgggttttatctttccaatctatgtccaagctgtcaatcatggttccgtttcattagccggttgggttacttttcccggtgcggtaattactgcgttaatggcggccttagcgggcaagctgcttgataaaaaaggcgcgcggttgccgattattataggaataattgctagtttgactagtttaattttgatgaatgttttggcaccattaagcaatcttgccattgtattgttatatgttctttattatggcggatacgggatgtgctttggcagtttaatgactagcggtttgattactttaggtaaagctagccacgcacaaggtaatgcgatttttaatacgttgcaacagttttcaggtgcactggggactgctctttagctgggactttgattgcgctagcgcagaataatcatgtaggtaatggtacagcagtcggttctaaatggacctttatgatattactaattttgataattattaagttattcttggctcttgtgtttgtaccgaagaagagataaaagaaagtcagcgaaagctgaattttttattttgtaaatatattaactttaaatatgtaatatttgattaatatactaaacaaaattataattattttgatcaatataattatataggagaaactgtcaaatcttttgtgtaaatagttctttctcgtaaattgattttttaattatttatttaatcaaagtaggattctaaggtgtcctgaacctgaccaaagcctttatgaattcgattgaaataacggtcattgtagctcattgcctgaatgccaataaaagcatcaagcgactgttcagttggaaactctgccttaggcttagctttgcgcttgatcacattgttaaatgattcaatcatgttagtcgaataaattgaagctctgatctgcttgggatagttataaaagaccagcagatctggttctatgtctttcaagcttctgataacatggctgtaaaccttgccccatttggtatagaagtcatgcaggacagctgtggcttcttctttgtttgtctgttgatgcacctgtttgaattcgttcatgatcttttcacgatcgtcgacgcgtactttagcgcagatattgcgcatgacatgaaccaaacagcgttgaaaatgagctttaggataagtcctggccaaggctattttcatgccaacaacaccatcagaaagaaaaagctcaacttgctttaagcctcgggatttcatgttttgaagcatatctgtccagacttcaatgttctcgctaggtgcaatgcagtagtcaatgacctccttgtgcccattaggcttgatgccaatggcaatatagactgcttcacgctcaaatgtttctcggcgcaaaggaaggtatgtcgcatccaaatagacgcagaaaaacttgtcgcttagcttgcgtttgtggtaagcctcaacctttggaatcatctgcttggaaatatttgatacctgagctggactgtaatggctgccatacatcttttcaattagatcggctatttccctggtggtcacgcccttggagtaaagcttgataatcatgctttccaagatatccgagtgctgcttgtagtcaggcagcgtgtgctgatgaaattgaccgttgcgatcccgaggcacttgcacttcaattgggccaaattgcgtatcaactttgcggaaataagcaccatttctagagttgccagtattccagccatttctggcataggaatcatagcccagaaaggcagtcaattcagcttctaacaagttattaacagcctgttgtagctctttgcgcaataaatcatttattttgtctggattgaatagagcttgagcaaaatctttggtaaaatcattcatgaaggagttcttctttctgtatgtgtttttttgttcaaaccaatcatacgagaaaggaactcctttttctaatgtttaaagaaataaatttaaggaatcattcatccttacacaaactattttacagtctcatataggagcaaaatatgaatccagatttacttgcggcacttattcttgaaggtcaaaaaaatattaaaagtattgctatcattcctcgtgattatcattttgaagatagtttgaattatgtgttagtaggcttgcggcgggctggcaaatcaacgttattatttaaaagagcacaggatttagtagataaacaaaatgtggattggtcacaaattgtttacttgaattttgaagatgaacgactagatggttttcaattagctgattgtaataatatcttaattgcagccaatcaattaacaactaagaagcattattttttatttgatgaaattcaaaatattgctggctgggaaaaatttgcttgtcgtttagcagatcaaggtgaaagtgtttatttaaccggtagtaactctaaggtgttgggtcatgatattgttctgcggctgggtggaagatatatgaccaaatatgtggcaccttttagttttacagaatatttaactgctaaaaaaattccacatgataaattatccgtcttggatacagttaataatggccaaattcgtgctgccgcaaatgaatatctatgttatggtgggttgccagaatctattatcttaacagacaagagaaattacttaacaagtatttatcaaaatgtatttttagctgatatcattgttcgcaataagattcgtaatgaaaagacgatttcattattacttagaaaaattgccgatacagtaatgcacaaagtttcatatgcaactttgtataaaaatataaaaaatgtgattagtacggtaagtcgcaattcgattattgattatatcgattacgctaaggatgcatatttgttattttccaccaaaaattattttgctaaatttagtgagcgtgaaagcagcccaaagtattattttacagataatggcattttaaatttgttttatctggataaattgccagcattactagaaaatctagttgcgatcaagttgcataataaatatcaagagaatttattttatttaaaatctcaaaagacagggatagatattgatttttatacgcgtggtgctagttaaatcgttctagacaataagccaaattataagctaaaattgcaatttccaaccggctttgaaagcctatcagactacgtgctcgattgttctcggcattgtaataggtcagaagcgaaaagtcgctttcaattgttctgcgaatagacatcaattgatgatcattgtgctttttagctcctgtcatatttttacgatatggtgtccaaagttcgtaacccatttgttttagctgttgatgcagttctttgcctaaatagccttcgtcgccaagaagatagtaattagatggatgggtattttctatcagttcaactgtctccctggcatcatgaactgatgcctttgttacgacataatcaagaatgtaaccgtcatcgctaacaatggcatgaactttgaaaccatagaagtaaattttcttggtggccttataaccaatgttggcataaccgcgaaaaattttagcacgatagtttcgaattggttggcaaacaggtaccggaaagctgtcaatgatcaagaactgtccattcaggtcaacctttttattcatttcttgccgtatctgataaatcaattgcaatagctgacgtgaacgccgattaaaacgtgagtgtgataaacaattgaaacattcacagaatcttctttgtgattcaattcctgtcttagcttgccagataagtaaagccaaaatcagactgtccgtagttttaatttgatcaatatttcgccgatgagtaaactcagccggtgcatacaaacgataccagtgccgacaaattatcactaaatctttaaaactaacttgtaaatggtggctaaaacgcttaagcttaaggcagttcaatcagatcagactcttttctattattactatttacaagtcgagtctaacaagattggacttttttattaactaaaacgatttaactagcaccacgcgtatttttatgtaccagctagtaaaactgcaattcaagttgcatgggaagtaaatgatacgtcaaaagaacgtgaagttgggaacctaattaaattagctgataattttgatgaagttgaaaacttaataatcgttactcatggtgaagaggctgaaattcagcaaaaagataagataattcagttaatgccactatataaatttttattaatgagatagtttttcgataactcataaaatggtaatgctcaaaattttttgagcattttttataactataagatctaaagagatataaaaatggacataagatctaaagagatataaaattaaagccaacaactaaaataatgaaaataggtgaacatcaattatgtctgaaataacgaatccatttgaccctaactttggcaaagttcccaaaatatatttggggcgacaaaaaatagtagaagatatagtaagatcacttgaaagtggcaccggaccctatcaaacttcaatgatctatgggatgcgcggggttggtaaaacttcattacttgctgatattacctcaactttagaacaaaaagataactggattgttatttacttagccatgacaaatgatttgcttgccacgctcatccaaagtatttatcaagaagcagcgaatccagtaaaaaaggcgttgaacaaaattgatggtgtaaagttttcggcttttggctttgaattggaagttcatatatcaaatcctcaatctacttatcaagtgttacttgaagaaatgttaaaagttttaaaaaagcatcaccaatctttattgatagcaatagatgaggttaaagaaactcctgagattgttaatttggcgtctatctatcaaattatggtgttaaaaaagtattcaattaatatgatgatgactgggctgcctaagaatgtttctgaactccaaaataatgatgtattaacatttcttttaagaagcggtcgtgtaccattaggaccacttgatcttttcgatattaagtatcggtatcaaaaagcatttgaaagaggtaataaagagattaataatactgccttaatgaaaatgactaagctgactagaggttacgcttatgcatttcaagacttgggatatcatgtttggcaacattctactgatcaggtaacagatgaaagtattgaaaattcgatctcatcgtttaaaaatgatctgtttcgtaatgcttatatcaagattatctctgaattatcgccagtcgatcgaaaatttttattcatcatggctcataatgataaaaatgttgttaatataagtgatattcgcaagcaaatgggaaaaagttctaattatatttcgcaatatcggcagcgattaatggatagtcaggtaatcattgatgcaggatatggcaaagtggcattttctctgccattcatgaaagactttttgttagaagcagaagaattatatgaaattgataactaacgaagaaagttgctctcaaaaatagagcaactttttatttgataattagactcttcgcttttgtccaccaaatgtgtaaacaataagcagaggtaaatgataagatccaggttaacagccagattccaaagaaagttaagaatgggtggtaaatggcgtgatattgcatgttaagaccgcgccaaactaattgattccagaagacattggataaatatgcgcgataagcataagtagccaagaaatggaatacttttaaactggtttgcgaattttttctaacttgatgcaggcaaaaagctgaaatcagtgcaattactgctaaacaatagagagtcattgacggcttgtaatatggtgcattattgaagttgattggataaccgaacttgtgcaactcaacattagtccaaatgaagcaagcaataaataatatggtaattacccaccaaaacttagtgaccagctggttgtaataaccacgcaattgccatgctaagacgccatacacaccatagatgaagaatgaaataaaaatgcggtcgagtaaataccaatcatgttcatgcatgccgtgaaagacgttgtaatcatagaaccaaagccaggcaaaatagagtacgaaagtgattactgcaatccaaatgcctcgagttagattgtgtcctacatagcggcttaatccccagaagattggcatcaaaataataaactgcaacatcatcgtgttgtaccacaagtgcggggcggcattaccattaatgaattgccaatagaatgaaccaatattgttaaaatgattaacttgttgcaaccagggcatccctaatagataaatgagcgtccaccaaatagtaggtacaaaaagattagaccaatttgtctgcatatgttttgcataagaaaaactatttttttcattattagtacggattgtggtatacaaaataccaaaaataaaggctggagccgtatatttgactaaattataaaaaacgccaaaaacatcttgtgtgtgaaccggttgttctacgtccatgaccagcgacataattggctgtgagattactgcgctgcaggcgaatacttttaaataatcgccaatatcagctatttgatagcttttaaattgatctgttttcatgaacttgctctcttcttttcctaatattattgtgtcatttttttaaattaggcgaaaggataatcatgttaaaattagtttagctattttggaaatggggtcaaaatgtcagtagaaaagatcacacaaaacgcactaaaagcattgctttatgaagtagttaccaatcctaagccaggtttagtggatccagttgacgtggggtctcatcctgatatgaatgtgtatttgtttattaatagcagtttgagtttagaaaattattttcggcaagcagctaaaattggagcagattttacggggcaggatttgcggcaaatgtttgaacaattgcgtcaagctggcattgaggcagaaaaagcaatgtttaagacaacgcataatataaatacccataaaggcgcgattttttcgttagggttgtttggctgtgcaagtagctattgtgaaaataataatcaaggtgaatttgaagtgatccagcagatgactaagggcttagtaaagcacgatttaggcaagaggaatgagactgctggagaaaaacaatttttgcaatatggtaaaggtggagttagagcagaagcagaagctggttatcctttggtgagggatgtagcactgccatttttagctcaaaccgaaggtgatttgaatgttcgtttactcgatacgttgatgaaaatagttagtgcgattgaagactcgaatttaataaaaagagcgggaaatattgaggttgtttcttgggcacataatcaagcaaaaaaatatttggcattaggtggctacggtactcaagctggtaaacagtttatgttagaactaaatcagatttttaaagagaaaaattatagccttggtggcagtgcagatttattgattattacaatttttatggcgttgcagcgtgggattatttaacgcaaaaattgtctagttaagaactagacagtttttttgcttttagatttaaagagatttaaaatgaaaaatcctgttaatccgacttttggagatataccacaaattttttttaaaagataattcggataatgaaactaaaaatgtagattcaattttctatttaggtttagataccgagtattgaaaaagcattaagctattgcagatagcttaatgctttttttactatttgattagatttcttataatccaaatgcaattttgtataataatgcaccacagattccacctgcaattggtgcaaccactggtacccaactgtaatcccagtgggctgaacctttgtgtggcaaaggacataaagcataaacaattcttggacctagatctctagctggattcaaagctggtccagttggcccaccaactgccataactaaagcagtaattaagaaaccaaccccgatgttagcaatgtcttcagattgcttgaagaacatgccacgatataaaccaactgcgatgaaaagcaaaatagcagtgccaaagaattcggtaataaaaccgttgaacttactgttagccgaatcaccagtcgcaaaactggcaaaaacagcatcatcactagtggttctgccaatgtaaggccagtagacggctactaagattagttgtcccacgatggcaccaagcatttgtaccaagatgtaaggcattacttgatcccatgggaagacgcctgaacaagcctgagctaaggtaacagcagggtttaagtggttccctgaaattgaaccaaagagcatggctgggagcattactccaaacccaaaaccgaaggcgatcaagagccacccaccattggcttgaccgtcacggctattaccaccggtatcacgtagtacagaattggcaactgatccgttacctaaaacaactaaaataatcgtaccgaaaaattcggcaaaatacttcattaaccaagtatgttccataatagatactttcttctcctctagtagaaaaaataagtgaaaaatagtacaaccacaaattatactcttaactcgaaaaatagatatagttttttgtaaaaaagcaagaaaatagcattaaaaaacactaacttttaaatagttttaaattaattaaaaagatttactatttggctgcaatcatcacaattttctaattatccagcaactcaataaattagaccgttccaaatatgaacattatttaacaagccctagataatgccaaatctacttttgacaaataaatgcataatcattatattaatttcacaaatttggtatatagctttatatatacttaatatataactttaagcgctttcaaaatattgtggtactatacagttattcacaattaatatgcataaaaggaaagagagtagcagttaatgagaacaatatatttggtgcgacatgggcaaactttgttcaatgtgcatcataaaatacaaggtacttgtgattctcctctgacggaattagggagagcgcaggcgacagcggtgcggcagtattttttgcaaaaagaaattagttttgatgccgcattttgctcaaagcaggaaagggcaagcgatactttagaaattataactgataatcaattgtcttatacgcgactgcgtgacctgcatgaaaaatctcatggtgaatatgaaggacaagatgaattcatgttgccatggcgacgtggctttagccgtattaatgccgcaatggagccggatcaacatgttgaagaaagaatggaacgagcgatcactaaaatcattgattcaacccatgccaacgatacaattttgattgttggacatgggacggcttaaaggttatttacgcagcgagtaaatccaacttttaaagaatatgataattgcgggatagtaaaaatgtctgctgttgataataacttgaaatatttaagttatgtagcacccgctaaagatgtggttttaaataaagcagctaaaaacgaaatgttagttgtgcgttaacgaaaagagaacaagcatgaatagagataattatattttgtggtttgatcaattgcattgcgatgatgttgatttagtcggtggtaagtcatcctcattaggtgagctgacttctgaaacgaatgtcccggttccgtatggttttgcgactactgccatagcttatcgccactttatgaattattctgatttaaatccaaaaattgataaattattggccactttaactgatccagaagattctgagcaattgcatcgaatttgcaccaaaattagaaaattaattatagaagcgccgatgccaaatgatttagccttagaaattagctgtgcttacgatagcttagcccaaaagatgcaccaaaatgagccattcgttgctgtacgttctagtgcaactgccgaagacctgcctgatgctagttttgctggcgaacaagatacttatttaaatattcatggtcgtgagaatgttttgaaaaaggtgcaagaatgttacgcttctcttttcaccgaccgggcaacttattaccgaattaaacaaaactttccacaagaaaaagttgctttatcagctgcgattcaaatgatggccttttctaaagcagctggtgtgatgtttacagtcaatgtagcaactggtgatgacactaaggttatgattgaggcctcttggggactaggcgaatacgtggtgtctggaactgttacacctgataactatgtagttgataaaaatacgatgaagattgtacacaaaatggtgactaaaaagccaattgagttgatcagattgccatcgggaggaacaattgaacaaaaggtagcaccagatcaagtgaatgagcctgctttgactgatgcacaaatcattgaattagctggttatgctaaagaaattgaaaaacattatggctgctacatggatatggagtggtcacttgatcaaaatgataagttgtggttagttcaagcacgcccagaaactgtttggtcacaaaagaaaaagcaggagaaaaccgatgcaccacaagaagcaactacagaacaccgagtattgttaaaaggcttgccagcttcacctggttttgtctcaggcaaggtacatattattgatgatccaaaagatatcaatgaatttaagcagggcgaggttttggtcactctaatgacgtcgcctgattgggtgccagcaatgaaaaaggcggccgcaattattaccaataatggtggaatgacctgtcatgctgcaattgtatcacgtgaaatgcagataccttgtttagttggaacaactagccgtggacaagctgctacgaaaactttgaaaaacggcgagactgtcaccgtcgatgctaaaaatggtgtggtttatgctggagttgttaaagacgcggttaaaaaagtcgatgaaaagccagctgagcctgctgcagttgaatatttcccaccaactgcaaccagagttatgatgaacttaggagatcctgatcttgctgaaaaatatgcatctttgccagctgatgggattggtttaatgcgcgaagaatttttatggacgacttatattcaccagcatcccctttatttgattgaaactggtcatccagagagggtagttaacgagctagctaatggaatcggtaaagtcgcgcgggcaatggcaccacggccagtagttttacgtttttcagactttaagtctggcgaatatcgcaacttaaagggcggcgacaaatatgagccgcatgaaccagcagacctattaggctggcgcggtgcttctagatattatgatccaaaatatattaatgcttttaaattggaacttgaagcggtaaaaaaggtgcgcgatgagttcggattaaagaatttacatgtgatgattccattttgccgaacagtggatgaagcgcgcaaagtgacggaaatcatgcggacacaaggtttagttagaagcgcagacttcaaggtttacatgatggctgaaattccagctaatattattttggcggaccagttcaatcaatttattgatggttattcaattggttcaaatgacctaacgatgcttttactggggtgcgatcggaataatgatgtgattgctgatctttttgatgaaagaaatcttgccgtcaaaagggcgattagacacttgataaaggttgctcatcaagatggtaagacggtttcgatttgtggtcaagcaccatcagaatatccagaatttactgaatttttagtcagaagtggcattgattttgtatcagttaaccctgacatggtgaaggcgactaagctaaatgtagctcattatgagcagaggatcctccttgatcatgcaactggcttaggtaaaaaggatccaaatgaatataattgggaaaatttataatttgatgaaaagtctttgattgcagtattgcagtcaaaggcttttttagagttcaattttgtttttgggcaattttacatttaatttagtaaaagagtaaggttgaactaatgaaatttcgtaagcatctaaggctaatctctcactggcaaaatcagggttatataaaggatcgcctacaataggacttcctaaagaggcaaggtgaacgcgaatctggtgtgtacgaccagtttcaagcgtcaatttgacaatcgcagtattgtcatcatttttttgtaaaacttgataatgagtaactgctcttaatccagtaggatcgattttgcgtttgcgttgatcaagtggatcgtgaccaattggggcattaatcgtacctctttcagctaagtgatcagcattgataactttagctaaataatcgcggtgaaaaattttgctggttaattcacgatttaaaataggtacaactgcaggatttttagcaattaaaagtaaaccaccagttaacatatctaatcgatgaacaatatagggactctgaccaagataagtagtacaatcgttcagagcagtattagtttcatttagattagggtgcgttttttgcccttttttcttattaataattaaaagattatcatcttcatagataacatcgggcatcttaccgcttggtgcataagcctgttgatcactttcaacatgatccaagttaatttcaattttatcaccaggtaaaatgttttgattaaaatagcgatagttgccgttaactaaaatattttgttcaattcgcaaaaaatgacgccacttgcgagggattaaaagttgacgtagtacttcattgacagatgccggagcaagattttctgggtaaaaaagtgtaaaatggaaactcataataatttcttaagtctaatctagttataaacacgtgttttgatagtatggtacaattttcttgtttctaaaaaggagcaatatttaatgaataacgaccaaccaagaagaggtggctttaaagatgcttggcatcgatttgatagtcgcttctttatcggacgctggattattttaatcctgctcacattgatgctcttaacttgtacctattatacaattaaagttaagacatcaaacatagctaatttgaaggcctcgctttcaaccacaactacaatctatgactacaagggcaaaaaagcaggttctttatactcgcaaaagggatcatttgtggaatatgaccagatttcgcctaatattcaaaatgccgtaatttcgactgaagatcggactttttggaagaacccaggttttagtattaaaggcatggtgcgagctgctttaagtttagtgattcatcacggtcaagtaactggtggtggttcgaccttaactcagcagttagccaagaactcgcttttgacccagcagcagactttttcaagaaaattggaagaactcttttttgcaattgaaattaaccatgtttactccaaaaaagatattttaacgatgtacttgaataatgcttactttggtaacggagtttggggcgtgcaagatgcaagtcgtcgctattttggcaaaaacgcaagtgaacttaatccgagtgaagccgcaactttagctggaattttacgaaatcctagtttttataatccggttgatcacatgtcaaatgctttagcaagacgaaatttaatcttaaacttgatggtggataataataagttgacagcggctcaagctaaaatgtatcaaaagcaaggattaactttgcggaatacttttcaaaataaaaacggctatcgctatccttacttctttgatgctgtagttgacgaggcaatctctaaatatggcttaactgaagaacaagtcatgaataaggggcttaaaatttatactactttaaatcaaaattatcagggtaaattgcaggatacttttgagcaaagctggcttttcccacaaaatggtagtgatggaactgaaagccaaggcgctagcgtggcaatggacccaagtactggtgctgttcgggcaatcatcggtggtcgcggtaagcacgtcttccggggttacaatcgtgcaacgcagatgaagcggcagccagggtcatcaatcaagccgttggcagtatatgccccagctttacaaaatggctatcactatgactcgcaactatcgaacaagttgcagaaatttggtaaaaatggctatgaaccgcataatgtggataatggctattctaatacaattccaatgtatgaagctttagaacaaagtaaaaatgtgccagctgtttggctattggataagattggtgtaagtaaaggcgtgcaatctgttgaaaactttgaaattaaggtaccaaagagtgaccgtaatttagcgcttgccttaggtggattatcttcaggtgtttcgccaattcagatggcacgtgcatattcagcttttgccaacaagggtaatttgcctaataattctttctttattaccaaaattactgatgcttcgggtaacgttttagccgaaaataataatccaagcagccaccgcgttatttctgaaaatactgctaaagaaatgacgactatgatgctcggcgttttcactaatggtacaggacgctctgctcagccaaatggcttccgtgtagctgggaagactgggtcaactgaagtacctaactcatatggatttggtaccaaggaccagtggatcgtcggttatacgcctgacattgtacttgctacctgggttggttttgaccgcactaacaagcaacactacatgcagggcatttctgaaacaggaattacgcgtttatataaggctgagatggaaggaattttgccgtacaccgcgcaaactgaattcacggagaaggcacctaaccagattgtgaagaataatggttctaatgatgactggactaatggattaggtgaaaaaattcaagatggactcggttctgcaggacagaaaatcaatgaatggtataatagctttaaaggcttatttggccaataaaatttaggaggactagatggttaacatttacgatgctgctaacaagttagcagaagatttgactcaaactgatcaatacaagaagttgcaagaagcaattaaagctgttgaagatgataaggatgcttcagctttattcaaaaagatggatgaattgcaaaataagatcatgcaagcacaacaagctggtcaaccactttcagctgaagatcaacaagcttacaaggacttaaatgatcaagttcaaaagaatgataaaattgtttcacttcttacgaatgaacagggtttgtacgatttgcttggtgaagtacaaaaagcttacactaagccaattaatgatctttatgaagatcttagaaattaatattcgcgatgaaatttattcactttgcggatgcgcacttagatagtccatttcgtgggctatcttttttgccatctgaggaatttaaccatatctatcaggcagctgatcagtcgctaaaaagaattatcgacctagcattagctgaaaaagttgatttagttttaatagcaggggatacctttgatagcagtcagccgtcaccacgggctcagttgttttttgctgcgcaagtgaagagattaactgatgcacaaattcaggtagtgatgatttttggtaatcatgaccacatgaagcaagaagatctgctagttagtcccagtccttactttaaattgttaggcaatagtgaaacagtagagcaagctacttttactacggatgcgggttttaactatgacgtaatcggcttttcatatctgaataaccatatcactgaggataaaatcccagaatttccagcaaaaggaaaaaattatacttttggtttaatgcatgctcaagagaaatcagctactgctagtcagaatgtgtatgcaccgtttacagttgatgagttgcaaaacttgaattatgactattttgctttgggtcatattcatgcgagaaataatttaagtagtacgccgtggattgtttatccaggtaacattcaaggtcgccacattaatgagatgggagccaagggatgctatctaggtgagattgatggaaatagtggtaagactactattgattttaaagaaacagggccaattttatggcaagggacaaaaattaatcttgaaggagctatcagtaaagctgacttacaagcaaaaattattgccaagcttgaatctggacaaaaaacgtactttagtttgacgattgctggtgctcaatatttgagtgccgaagaacgcgatttagttcaggatcctgatttttggcaaactatttctcaatcgctgccatttgcttctcagttagttgatgtgcgctttgttgtgaatactagtttaaagttaaatgacaatgaccaacaagccttccaagctgccaaagaagagttatttgcaccagctgaattcaagcaaattgttagtgactggcaaaaaaaggatccagaagctgctaaattagcggctgatccagactttattgcggcggttaagaatctaacagaagtaaaactaatgagtaaattgaaaggaattaaggatgagactgaaacaaattaagattattaactttgggcagttctcgaataaaaccttcgatttgcctagtgatcaaattaatgttttctttggtgccaatgaagctggtaaaagtacaacggtagcttttattaaacagatcttatttggctttcatttgagaagtaactcttcaccgttttttgaagattatacgccgctagctcatgttagtccgatgggcggtaatttagtttttactgcagctgatggtgaatacgaacttgagcgactctatgctaaaggtgacaagactaaaaagggaattttaaccgtcaaaaaagatggtcaagttgtacctgagagtgtattttttgatcagattcaaaatattgatggctctttttacgctgatagttttatttttaaccaagaaatgctgggtcaggttaacagtttaagtcaagaggatttgcttgagcgaatttattacttgggagcagcagattctagcaagttgctggaaatgcgcgacgattttgccaaagaaacgggtaagctttttaaaaagacaggtaaaaagcccgaagtaaaccgtctgcttaaggaaatgactgatcaacgtgataaattagcgcagactaaaaatgagtttaatgattatgaacagctgcaccaagattttgtacaaaaaagagcggcattaaacagacaaaaacaagatctggctgttttacaaaaacaagaacaagatttgcatgatttgcaaaaagaaatgggcaattatcagacgctgcttgatttgcaaaaacaggtcaaggatgtcgactttaatggtcaaaattatcaaaaagcccaagatattatggctcagggacgtaatttgcaaaagacgattcaatcggtagaagcgcagttgcagggcctgggtgaaaacgatcagtctgattttacgctagagaagaagctaatccagcagaagcctcaactcttgcagtggcaagcggaatatcgtaattgtttgcaaaaggctgaccaattgaagcaggagaaagagcaactattagctttgacacctgagttaaaaaatctactcaagttgacaccagagcaaattgaacaaatgcaggcagactatcaagctttgccaggtgctgtcaatgagcctgcttatgtaactactaatgacaagctttggtatgttatcggtgcagtgttagcggcattaggtgtagttcttttggtagcgttgggtacagttggtgtaattgcattaattactggactaattttcctagcagcaggatacttaaaaaatagtaaccaaaataagcaaaatgcggcagtattagaaaagcaaaagctggttgctcaaaaacgccaagctttccaaacaaaatatggattgaatcctgatacgctaaacttaaatagcttactaactaatctgaaccaatatcaaatcaaaaagaatgccgcacagactaataataagcaagtaactgttttgaatcagaatgtggctcaactggcctcaagtgtccaaaatgcattgaagcaaccgattgataatgactttagtcaagttttgaacggtttggacgaacttgagacacaaattagtgaaaaacaagaattgcttcaaagaaaatccagcttaactgcatcactaaagcaggacaagcaagatttgaaagaattgggtctgaaattacaggcactttttgcccaagctaatgtggaaaatatggcaggttacgatcagctttatcaagattcacttaatcaggctaaactgaagacgcagattgcggccttgaaggaatcgttaggcgatgatcttcaacagctgcaaatgcagacaaattcaaccgaattagcagataaattaacggctttgactgaacaaattagtactaagaatgcagaaattaatgaacttcagagtcaagttgctcagttgcaagtgcagttagacaatttagctgattctactgcggtgtttaaggctaagcaggatctggctaatacagaaaccaattttgtccagagcagtaaagaatacttggctaacttgtttgcggcaaggtggatcagtcgctcgcttgacttggcatctaatgaacggttccccaagatgcttaaggcggctcaggaatacttagctttgctaacgggcggcagatatgttgggattaatttagataagaagctaacagtagtcagaagtgatggtaaaaagcgcgaagtaaaatacttgtcacgggggactgctgagcaattatactttgccttgaagttagcttttattgagcagatcaaggatgaaattaatttgccaatcttgattgatgattcgtttgtaaactttgatgatcagcgagtcagctatatcgatcagttattgcaaaagattagcgaaaacaatcaagttttaattttcacagctcaaaagaatttagttgatcagcttgggattgagccattaacttttacgaaaggaacacaggatgcttaagagattgttagattacaacgatggagaagaaatggacattgttgttttgattagaaactcacagttgcgtcataataaaaagaataagttgtttttagcgatgcaattcagtgatggctcaggcgagattcgcggtaattactgggatgctaacaatcaagatgcagcaactttttcaactgggacaatcgttgagttgaatggcaaaagagaagaatatcagggtcgcccccagattaggatctattctctgcgcgtggtcggtccacaagaaggctatgaattagatcaatttattaaatcagcgccggaaccagttaatgagatggaagctgaaattaataaatttgtgatgcagattgataatccgacctggacaaaaattgtgaagtatttacttcaaaaatggcatgatcgtttttatgatcatcctgctggtaaaagcaaccaccatgcggtccgcggaggtttagcttttcatactttatcgatgcttaaggatgccaaaggtttggctgataattatgagcaagtgaatagatcgctactttatgcgggatgtattttgcatgatatgggaaaagtactggaactttcaggttctgccgcaactcaatacacgactgaaggcaatttggttgggcatctggttttaattgatgaacaaattatgctggccgctcaggatatgaagatgaatctggagtcggaagatttactcttattgcggcatatggtgcttagtcaccatggccgctttgaatatggttcacccaaattgccggcattgctagaagcggaattattgcaccgaattgatgatttagatgctgcaatttatgcagtaacgaatgccctgcagcatacgcctaaaggcgagttcaccgagccactactgagtcaagatggcaagcgatattatcgaccgatgcacgattcagcgctagataacgcaaaacatttagaataagaaataagcatcactgcagttgatttgcagggatgcttattttgttgaaaaattgaactagagttttattataatttcatagtataataaatctaatttataggggagtaaaaaggatggatattgctgaaattactaaaatgattgaggcggttaaacaaataatagaaaagaatgattacattgatttgccgctatttcagaattctagtcaattaaggttaaaaggaaataattataattttatacttgatttgaatagaaaaggacatagacgtcctaaatgtacttttctattaagggaaaagagaaataaggaacagccattagttagagtagatattattggacgtcctcatcaaaatcctgttggagactttaaatggtcaaataaagtcattccttgtcctcatttgcatagagcggattttccaaaatatggtacatatgtagctgtaccacttttggaaaagaatgaaaattttcaattgagtcagaatgatttaaataacttgtgtgaatgcttgaagaagacattaaagtttttgaatgttgataatataaattcatataattttcgagaacaggaaagtttattttaaagaaaggggggagaacagttaaatatgtttgatgtagagaaaatgaagaaaatatattttgactggatagataaaaagattcaatttgtcccttctaaaaatcaggattatatgactatcactacaccttttttagatatgtacaatgattatatagaattagtgattgcacaaggaaatacatcaaaatatataattagtgatgatgggtatactattaatgagttagggttattagatattaatttaaacagaaaatctaaacgtagggactactttcaatcgattttgattaattttggtgtgaaaaatcagaataatgaattagtaattgaatttgatgacttagcccaatttccagatgcacaaaataggttaactcaatgtatgttgcaagcttttgatttattacagacttctaaaaatagtgttattaagtattttaaagaagatgtaacaaattattttattgataataatattccagtaggagaagatttgagtttactaggaaaaagcggacggaattctaagtttgatattgtggttggacgtacaagaaaaaaaccgcaacaagctattaaggtggtgaatacgcctattaattctaatatagctaaccctttatttagaattattgatgtacgagaaagccaacctaaaacagaattttcagttattgcgaacaatattaatagtcctgtttctagtgattttaagtctgcctttaagaactataatattcctgtttattcttggtcagaaagagagcaatggctttccaaatttaaattggcaatgtgatagttgattaaaggtgttgagctgaaattgtaaataatattagttctagcattaggcaatatggaacatttagaataagaaataagcatcactgcggttgatttgcagggatgcttattttgttttggtgaaaaattgtgtcaataattttttgaacaaagttattgacaaattagctgaagaataataacatgtttatacaattgaaaagcagagatgtttttggatagattagagacttgtctcctttctatttttttattgataaaaagttcaagaggtatacattgatttcctcttggacttttttgatgcattgaattgctaaagatgttataaaaattagggtagggaataaaaatgaaagcatcaaaaaaattaattttagtatcggcagctacgataatgttgactgtacctgttttagcaaataatcatttgtctaatccagttgttgccgcaagtcaagataatacacaaactactaaattaacgttctatattaaccacaatgcctatgtttacaatcatcaaggtaagcgtaccaagagcaagattaagaagggaaagttactaaaggtgactatattgaagcctaaggcaattactaacccaaatcaaagcaggtatttcttcaataatgtattagctggcaagtatttttcgttaccgacagtaagcatcaagaagacagactttgttaatattggcaaaaataaatatattaagccaggcaacattggtagaatctcgccaggaaaatatcaatatgcggatctgtcaactaaggaaattaaggtaattaccaaaaagactgctccagtaactaatcaaatagggatgccaattgctgctccaattaagaagggaactaagcttacagttgatcagaactattatcataatgttgacggcgctgatgattatttgagtagtctggaatattatcggattaaaggtactgataagtgggtcaacctacctgatatcaaaaagtcaactcggattatgccaaataattttgcattagctgcatctactgaagataattatgtcattgccggtaactcaacgtatctctataatattgacggtgaaatcgttgataagagttatttattgattacagatgttaatgttggcgttgatcgagctctttatatttggaacaagcaaactaaacaagctgatctatattatcatcttacggctaacaaaaaattggtctgggttccagctcttgatggaacaggcaagactggtactacgattaccagcaacggctcatatgctcaccaaactaaagatacagcaaatacttttgttaaagctagtgatgtgacaagtcaaaatccagttgcattaaaagttgataatacaccgagcgaagcacaagcagatgcaactcaggccactgctagtgactatggtgagttgcaagccttagttgatcgagcaggtcaaattaaaaaatcgactttatatcgtttgactgaaaaagcacagcaagaaagatatgatttggccgttgataacgcacaaaagttattgactaacaagaatacttctattgcggcagttaagcaggctagttggcaaattaaatacgatcaaagtaaattagacggacaaaaagtttgggttaaaaacatgaataaactaactaaggcagaaaagtcttgggtagtttcattggctaattgtgatatccatggtgatttacaaaaagaatatgctggcttttataaaggtaaaattgcggtagtgacttataataaaaagactttcaagagtgaacttgtacgctacttgaagttgtctgattatgctactgataaataaaattaaagagctcaagaatgctttaatgatgaagcatcttgagccttttgatttttagtaaaaaaatatccaagactgaaatcttggatactcattggagctggaactgtgcttgatgaggcaactgctagaatggcgattgtttcaggagctagattcgttgttagcccatcttttaacgaaaatactgctaaggaatgcaatctgtatgcggttccttacatgcccggttgctttagtccaacggaaattcaatctgctttaacttatggtgctgacgtagtcaaaatcttcccaggttcaattgctggtaaaggcattatttctgaaattcatggacctttcccatatgttaatgtaatgccaagtggtggtgtatcattaggaaatatgcatgaatggtttgctagtggtgcctatgttgttggtgtaggtggcggattagttggacctgctaaaaatgatgattataaagctgtattgcataatgctcaagcttttcataatgaatttcaaagtattatttatgccaactcagctgctactagaaaggtgccagtgagggcatagtttttttttgggggaatatgatgcccctatttaaaaaataaattaatgaaataaaaaaacgtcgaatccattcagattcggcgtttttgattaactaaatatatttgttacttagtagttgaaacgtatgatgataatacatccttcaagtcgctatccttgattgaaacgtcagccttcttcaaaacagtagcaataacgtctttcatagtagcttggtcttgagccattgatgcgtaaatttgatcatcaatagccttcttgtggtcagcaaacttacccttagctgggtggctgatcatcttgattacgtggtaaccagattgtgacttaactggagttgaagtaacttcaccagtcttaagcttgaatgctgcagtcttgaatgagctgtctaaagtagtgtcagttgagtcgaatgatggcaacttaccagccttgttcttagtagcagtatcaagtgagtacttcttagctaaaaccttgaagctcttgccatctttcaattgcttgatgatgctttgagcagttgacttcttagcaaccaagatgtgttgaacagttaccttaggttgatagctcttccaagcttgttgttcttgcttcttagtaactttcttaatgtgcttcaatgcttgttcagaaagaaggttagtcttaatgttttgcttgaagcttgaagcagtcataccattttgttgtaaaacagcactaaattgtgagccgtattgcttcttgtagttgttgtattgcttgtcgactttcttttgagatacgtacttgccgtattgttgttccaaagcgcgattgatgatcatgttagccaaagttgacttaccggcttgtgacttcttcatttcatcatagtattgttcttgagtaatcttgccacccttgtatgaagcaacagtagctttagtgccgctattagaacaagcagcagttgataatgcaacgccagctacagctacgactgcagcaatttttttcatataactcttcataaaaataatatctccacatccttaaataagtaactgttcattaatataccataaaaaagggcgtttcgttttcaaattacgaattttcacagaaaaatcaaattttctttattttttcttagttctttgtgtcttgtgagttagtatctggcacgatgttttccaaatcttggttcaatttatcgctctttttttctatgcggttaacgataggttgaatatggtcggaataatgttcaacactatcattaatatcactaattgtacgttcagctgttggcatttgttcatttaattcttgactagcctttttagctttttgcaaggcagaattaaagcgttggctttcatgtttaattgcttcgaactcatcttttaatggcttgcctgggcgattaccattgctatctttcatacaggaaaaaactagcccagctgttgcaccaaaaactgtgcctaataagaaatgtttcatttttaacctctaaaattgtgccttaattttgttagcaacttcgttgtatttagcttcatcgtatttgtcagcgttgttgcgggtcatcagcttcaagccatcgccttcaaaacgaggaatgaagtgaatgtgtgagtgcataactacttgatttgcggccttaccattattagtagtaatgttcattgcagtaacattagggaaggctgccttaattgcattagcaatttcaggaatatattgtaaatagcgttgtgcgtcttccttggtgtagtcaaacaagttaacgatgtgcttttttggcaccattaaggtgtggcctgggttaacttgagaaatatctaagaaggccttaacatcgtcattttcaaaaacggtatagctaggaatttcaccgcggataattttgcagaataaacaatctttgtctaaattttccataataaaacctcatatccttgtactttagtttactattaaatccatgctatcataataaaggtataaattcagtaaagaaagataggaaaaatgacattaaaaattgaacatttaacgggaggctacacgggtgtcccggttattaaagatattaatttggaaattaagccgggtgaggcactaggcttgattgggctaaacggcgcggggaagtcaactacgattaaacatattttgggtttacttcgcccgcaaaagggtaagatcagcttgaacgatgttgtattgacgcggcaaccaactaagtttaagcgtgaagtagcttatattccagaaacaccgattttgtatccggaattgactttaaaggaacatttggagctaaccatgttgagttaccacttggatgaaaataaagcatggaaacgcgcacatgagctgcttaagatgttcagacttgatgacaagctagaatggctgccgattcacttctctaaggggatgcgccagaaagtaatgattgtctctgcctttttagcagatactagtttgcttgtaattgatgaaccatttactggccttgatcctttggcagttgctaacttaatcgatttaataaaaaaagcaattgctgacaaaaagatggtcttaatgactactcacgttttagctgatgcacagcaagcgatttcgaattatgctgtgttaaaccgcggcacgatcgaagttgtggggagtttgcaagaaattcgtcagcactatggccttaagccagatgatccttttgacaagttataccttgctttgaatagagaggataatggcaatgcgtgagttagcgaatagaaggttgagcgagaatcttaaacaatcagtaaaatatttgacgctggtgtttaatgacttctttattttagcgttgatctttttgtttggggcgctgatgttctggtatgcccaagctatgcgcgtaattcccaataatctgtggttctataagccacttgtcggctttatcatgtggttgccattattagctggtcgattagttaccttattaaaagaggccgacatgcaatttctgtttacgcaagatgaacaaatgggtgaatatctgaagccgatgattcgttacagtatggtgctgccaacaattctgattgttttgcttggcggaattctgtttccgtttgcgacggtaaaggctggaatcccagtttggtcatatgtaatcctgattatcagcactgttttattaaaattgtgtatgttgctgattgaaaaagagagtttgtacttctactacaattatccgcaatggatattattagtggtaactctggcggctttgttgattggctcactaggatcatttatttatccaattgaagttgtagtattaatggtaattacgcattttggtactaaaaaagaaaagggcgtctttaactggcgctatgcgattaaaactgaacaagctagaaaagatcgcgtttattcaatcttcagtatgtttaccgatgtggcagaaaagcaagttacaatcaaacgcagaagatacctcgactttcttttaccaaaatcattggctaaggaaaatcctaatttgttcttgtatcggagatcacttttgcgtaatccagaatacttgaacttattagtcagaatgactgtctttgcaatcttggtatcgtggttagtgcaagattggcgttgggcactaggcctttcatgcttggtaatctttttaacggtctatcaattattgccaatggcaacagaatttgaccgcaacttcatgtaccgcgtttacccaattgaacggcaaaatcgtggcagggacttggtaaaggtgttgacaatgggcttgtttattcaatggctcttgattagtgtctgctggttaattgtgctaccaattaatgttaacttgtttgaagcgatggcaattttacttggtttcactatgattgtaactgccacttacttgccaggcagagttaaaaaaatgaatcaaaaaaattttggaattagataggaatagagaatgagattaagaaataaaccttgggctgttaagcttgtaaacgaccatccagaaagtgttttgcaaaatcctgatcctgaaaaaaagatcgactggactgaacgatttggtaatgatcatcccatcgaaattgaagtaggttctggtaagggacatttcattactacgttagctgaacaaaatcctgataaaaattatgtcgcattagaattgcaaactacggctgcggggattatcttgcgaacaaagttggaaaagggcttggataatttacaaatcttacgcggggatgcggctgacatcaactgcttctttccagcaaatagcaccaatgttatctacttgaattttagcgatccatggccaaagactcgtcatgaaaagcgtcgtttgacttacaagagttttttgagcaagtatgaacaagttctgaagccagaaggacatattgaatttaaaaccgacaatgcgggcttgtatgcttactctgttcagagcttgaataattatggaatgaagtttgattttgtttcagttgatcttcatcatgaaaagccagagattgtggaaaagaatattgaaacagaatacgagcataaatttgcagctaagggtaatccaatttatgctttgcacgctcattttgaggatgaatagtttgaagcgtctagagttacagcagataaactctaggcgttttttaatgctttattggataaaatcttgctactagctcatcgctttagttattttgttttagaatagaactgtaagatttcagattattggagggaaaattatggaagataaaccttattatgaacaagaatatcacgaacctaaaactgatattcctagaccaacttttggacaagcattcaaacttttgtttactgcaccatttaagtagaatgcacgtagtactcgtcgtggattttggtatgcctatgtttgggcaattattttgctagtcattttagcagcatgttcagctacggcatattcaattgatggcattgcttattaaagtaatgaattcttcttattaacgcacgtttcaactggtacacttattattcaaataattatctatctactgattatttggatcttattgggcttacttggctttaccataagaagattgcatgatactgaccacaccggttggtggtactggatctcggttattccatttggttatttgtttttactttacttcatggttttgccaactgttgaaaaaccagttcgttggggcagttatctatttaaagaaaagaaataattgtaagactcaatttctagctttttagttaaagaatggttataataatatcaacttataaaaagtaagaaatgcatgaggtgtgaaaaatggaaaagattaaagaattaactgaagatcaattaaaggaaattactaaagaaggacgtactgtgcttgaattctcagctgattggtgcccagactgcaagtttcttgctccatttatgcctgaaattgaaaaagatttttctgatgcaaaattctacgaaattgaccgcgacggttcaattgacatagcaaaaaaattaatgattatgggaattccttcatttgttgtctaccaagatggcaaagaaattggtagactagtaaataaggaccgtaaaactaaagatgaagtggaaaactttttacgatcacttgactaatagaggagaataaaaaagcatgattactagtactaataaagaagcttatcctaacactttgatcgttatcttaggtcacgatgaaggccgtagctcatttgaggaaaaagaagacgttactcgcgtaactaacgatgaaggcaagaccattggttacaacttcttcaacgttgataagttagttgactttgataagttaccaaatggtccagttaagttgtcagacgatgagcttgttgcactgaacaagaagcttgatgaagttggttttactgacaagttagcatatggcaagccaactttagtttatggctacgttaagacttgtgaaccacaccctgattcagatcacttgcacgtaactactgttgaggttgctgatggtgaagaacaccaaatcgtttgtggtgcaccaaatatcgctcaaggtcaaaaagtagttgttgcacttccaggtactttaatgccaaatggtgcacaaatttggccaggtgaattgcgcggtgttgattcatacggcatgatttgttcagctcgtgaattaggtttgccacacgcaccacaaaagcgcgggatcatggttgttcctgatagcttcgaagttggtgcagaatttgaaccaactaagtgtgatgaattgattgctagtggtgaaattactttataattttaaataaattagaaaaactccttagttacgaaaactagggagttttttggttagctctgccacaatttaccatctggagcaaggttgaatgagccaagtttttttgatattaatttattgctaagatctttgctacaagtatagtaaacgtatttaatgaaatcgccattgtcgttatagcgttcttcataatcactcaaatatagctgatgatttttcatgaacagtggaatctgatcttcagtataggtgattgcaaatttgtctggaaaataccctttaactgtgcagcctttggtatctgtcccttgatcgttatcactgactaattgcacactgtcgtcgctggaaattaaacgtaaattatgcaaattaacagcatttaacgaacaagtgaaaataacttttgcttctttttctggttgatatttaaaaatatgcaattcatttgatttagtatttacttgagtaaaatagaaaaagccatcattaaaaattggttcgccgtagcacacgttaggttggactgaaaatggtgaaaaagccttactggtcttttgatcaaagaagattaagcgattgccaggataaatgcgagtttgccaataatcgtcacgcagatcttcaaattgtacataatcagaaatcgttacccaatattgatcttgaccggctaatggtctttgatcacaccaataaggcaagatgaaactatcattaactttttgccatttatcattagatagcaaaatgatatttccttgcatgtcgcttagaatattatcatcgaagtccttgatgataattcgatcagggacatgttcatagtcattatctgaataaaaatcgctatcttgttcaaaatagagtttagtgtcattaatgaagagcaaagtttgatcaggttcattaactactgaaaatttttgtgggtaataaaagttgatgttatcatcaaaagaagcaatccagacgtgtgccttatcgtaaaccaatgataaattatgagtgtgtaaaccagtaagtggcatttgatggatgatttcaggttcttgtccaggtaaatacttaaataaggttagttgattttgtttaagtaatgcatgtagaaaatagaaataaccatattgatagatcacgctaaagaaaaattgattttctttacttgaaattggttcaaatttttgtccagtttgaaagtcaaagaagactaactgattgcctggaaagggatgcttttgccagtatttttcagtagttaaatcgtaaatatcgattgcactatcctgacaatcgacaccgtagcgtgattgtccttgaatgattgttaaatcattgccggttacaggagaaaatttatcgaatttcattgatgcgtacctttctgtaatttttcaaaattatatcacagaaacaatggtaaaatagttaacgaataaaaacgttgaaatttcgagggacaaataatgttagataaaaataaacaaatttggttcattggtatcaaaggtacagggatggcatcccttgccttgcttttacatgacttaggctatgatgtagcaggtagtgacattgaaaaatatacctttacgcaagtgccacttgaaaatgtgggcattgatgttaaaaactttaacccggataacatcaagagtaatgatgaacaagtaattgttaaagggaatgcttttaaagaagataacccagaagttaaagcttgtttggacaaagatgtcaaatggcaatcttacccagatactgttgaagaaattgtccaaatgcatacttcaattggtatttcaggtactcatggcaagacttcaactactagtctcttatcacatgtattaggtgaagttgccccaacttcttacttaatcggcgatggtcgcggcaaaggtgtggcagattcgcgtttctttgtttatgaagctgatgaatatcgtcgtcactttttggcatatcatccagattaccaaatcatgactaatattgactttgatcatccagattactttaaagaccaagctgattacaccagtgcttttcaatcagcagctgatcaaactaagaaggcgctctttgtttggggcgatgacaagcgtcttcagagtcttaagaccgatattccaaaatacacttatggctttaacgatactgatgacttccaggctactcaaattcagaagtccactactggttctaagttccatgttttagcacatggtaaagatttaggtgaatttgaaattcacttatttggtgatcacagcatcttgaactcaactgctgttattgcggttgcttacactgaaaaagtgccgatggatgacattcgtgaagggatgttgacctttaagggtgctaagcggagatttagtgaaaaagactttggcgatattgcagtaatcgatgattatgctcaccacccaaccgaaatgcgtgcaactattcaagctgctcgtcaaaagttcccagataaaaagttggttgttgttttccaaccacatactttctcaagaactaagaagtatcaaaaagacttcgaagaaatcttgcgtgacgttgataaagcttacgtaactccaatctatgcttcagctcgtgaagctaacggtgatatttcaagtgaagacttggttaagaatattcctggctcagaagtaattgacttagacaatattgctgacttgactaagaataagaattcagtcattgtctttatgggtgcaggtgatattcctaaatatgaagatgcttttgaaaagttgctttaattgaaagataagcatgaaaaaaactgttctcaataagagagcagtttttattttggctaatctttgattttatctttaagatccagactcttttcgtaaatgaagtaaccaatgatacaagtgattacatcactgactgcttgagcccaaacaataccatgataaccaaatacatctttcatgatttctagtgcgatgaaatagacaacgccttggcgaacgatggccatgataaacgctgcccatgcattaccaactgattggaagacggtagtgtaaactaaaatgataccaacgattggtgtggtaataatagtggcaattaacatataactaccagcgttgatgatatctggttgattcataaatagagcggtgactggacgagcaaataaaattaataatccgcctgaaattacagcataaacaatttgcacaagaatatcgaagtttagaattttctttaatcgtttccagtttttagcaccatagttgtaaccaattaaaggttgtgaaccaaaggcaaaaccaacgattaccaagataacgatactgtaaatcttttgggtgattcccattgcggcaactttgtttgcaccgtatagggctaaagatgagttaagaagtgccataccaaagctttgagcgaagttggtgattgaaccgggggtgccgattgctacgatatctttgattgttttgccgctaattttgctatattttagctttaatttgatgtagtcagttttgtataaaacgtagtaaatgagaatagcatcagtgactagataacctgtaacgttggcaatcccaacaccgattgcacccattttgaaaacaaacaagaaaataggatcaaggatgatagctaaaatggttcccgtcattgtagcaaccattgcttgggtagctaaaccttctgttctgattaagttctgcggaatgattgagaagataattggcgcagcaccaattgatattacacgataaaaatcggcagcatcttgataggtggcagcttttgctcctaaaagatgaaggatcggattttccaaaattagtaaaatggctgttagtattaaaccagtaacaaatccaccgatcatacaaaaactgcttacacgtttacttaattgataatttctttcaccgaatagccgtgaaattagtgaagatccaccgagcccaaaaatgtcagaaacagcgattaaaaaagtaaaaagtggagcaccaatcgtaattcctgctactagatttgtatcacccgttttggcaacaaacatcgtgtctgccaagttgtagatcatggtagtgatcatccctaagacgaccggtaatgctagcttaaagtagacctttttaatcggcgctttagcaaataattcatccataaattttcccccacattgaaaaaagcgacctagaaagatactttgaggtaaacctcactattctaggtcgctacgttatatcatttatttaattttagcatattgtgttaatttgtgaggtgattatctaaattaaagttaccttgaaattcatcagtagtgctttcttgatccataccatattcagcatcgtcgccccagtaaatgtattgtgaatttttgcccttggtaccggcaattctgaagtaaagtgcagcgctgtcgcctttaccagtggtcttggtggcatctaccttaactttttgaccaatcttgagcaacttgctagttgacttgagcttattatttaaaacgtggatcttgtttaaaatagtggctgtagtggtgctagaagcttggtaaagagtgttgccgttaacaaaaccaacatttgaagcataaatataagcaccgttgcctaaagcataaaatggcttgcccttgatagtggttgtattcaaacttctcttcttagatccgctaagatttgcaaagtagaaaaatacgtcattcttagttgtggcgtggattttagctggcgttttaactagcatatatttaggaataagcgacataccgttgaaagtagtgcggtgaccgtttttatcataaatgcgagagttggaactcaagattaaaacattttgcccatccattgagctaacattcaaagatttgatgtagcgttttttaccgatgttaacgtaagaagcggtagtgtagtggtagttcttagaagtttttgcatctacttttttaccttggatcaggataggtttgccataatatttaaaacttgagcctgatttaaccgttgaagcaacagtcatcttcttgccattgactttttgggtagtggtagtggcattgcctttgctgttgaagacttgaactgtgccgttaaaggatttcttgagagtaactttacctttttgtgattgcgtagctgcttgaactgtgtgaacaggttgattgataatggcagctgctggtgcaacactgattaataaagctgctgcgatagttgctaattttttagtagtcatattttgtctgctatataaaacatggaaatatgtagaagaatacgaatttcctacatatcagaaagatatatttttcctttctttgtttcatttactgtcgtcttcactagtattctgatattccaaataggagtaatcacattgactagctcttacagcttaaggacctagcaagccctgtttattttctttattttgccaaagctaaaagatttaaaaccgcattttcatctcgatcattcttgtagccacactcataacagacatactcattatgtttggtaccatgctttttattgccctgcaaagtgatcttttcctcgccttttttgacataaccgcacgcagcacatctttgagttgatgggtatgttttatcagccgagattaattatttgccataccaatcacacttataagttagtattcgtctaaacttgctaaaaagtgatctctacattccttttgaagctacatgcgtcatcatcatttctttgactgccaaatcttcaattacaatttgatcgtaattattaacaagcttagtagtaaatttttgtaatagatcgttttgaatattagctgctttgcgataatctctttgcagtttggttctcactgcaaagtaattatttgattttgtagctaacttaccgttaacttctcttttacgtgccagcattctttgataatgcttaatacgcttataaagcttttgcaatttaacaggcaaaatattgatttgcccctcggtatagttaaagtggccaacattgacatcaactgctgtcttttgctgggttttagcttttagttcaatttcttcttcataaggaagagccgcataataattatctttttctttgaagacacttactactttgacttcatccatctttagagcttcatagcttcatagcttcatagctttttaaatcaaaccaaggctcttttgaaatgcttcttgggcgatcaaggcgaagcttaccattaacgatcttagctctatcagttttaaagccttgtctgggagctttcttagatttaaaactaggtattccccaatcaggttgtgacttatcaaagaagttcttccaagcattagctaagtctttaatcgctaattgtaaacatctggcagacaaatcatattgccagtcggctttatttgcgactagttcatcacggactctgcgttcgttaggactgggattatctttttggtttaatgtatgagcttcatacattaattgccaagtttctaagcctttattccagcagtatcgacgatagtcgcatagagcatcaagatgcttttgcatggtcttattaacttttagcttaactacttgtgtcttgatcgtcatttaagtactcgcctctaatctttttcttgtactttcttaagccatatagtctgcatgaaaacacatgaattatacttatcagatcatcaaccagttctttatcaggactagtgtcaatattattcaaaacaattatttcagtcccatgctttttacataggttttcaaaccaatcatagccaaaacggataaatctatctttataagtaatataaattttatctattttgttgttcattacttcgtctagaagattattccatttttgccgtttatagtttaagccgctgccaatatcgcttatttcttcgtctaatacgataccttgtgcgttagcgtattgtcgaatatggcttaattgatcttttaagtcatctttttgaccataagttgatactctggcataagcaacttgttttttatttgagcttagattatttttgctcaaatattgatatatttgatcttctgtatagaatctgcgattagtaggagagcgcttagctttaagaataccctttcgatcccatgtttggagggttctagtggttattcctaaacgatcagcgacatctttaggttttaaaattgtataatattcacttccatgtttaaatttctaatgaatattatggcaaatatttctattatattctataaatttccatattttgttaacagttaatcagctcctttgtaataatcccttaagttgattttagcacttatgagactataaaaataacctcgaaactcaaacgttttcggggttatttgattttattcacttaagtacttaggatcaataaatttattgatcacgttgttaaccttctttgaattatcgtacttgcggataatgttcaagaagtcttgtgcagttgcttgcttcaagtagtaagtttgatagtaatcgtgtaaagcatcgaagaacttggtttcgcccatggcaacctttaaaacagcagggaagtccatcccaagttcgtaagccatgtcttcagtgtcaacgccctttggtggattattaacagggtagttgatgtagttggccttttgattcttattaatgaattggttagcattttcttttaagatcttgttagcacgcttgacgttcttacgagtatagaacttgctgtgcatcagtttagcacagtaggccttattcttagtgtaggtcaaatcgtaaacgccattttcaaggaggttggtaagaccttcgtcaagccaaggttccatgtattcgtcgctgccgacagtgccgtagaaccattggtgaccaacttcgtgagaaacatcttcagttaattcattatatctatcaagtgggtgcttcttttgtaaaaagccgctggcatcgatcatgatcaagccaggatattccatcccacaggtatctttgccaagcaagcctttagtaatatcgatttctttgtaaggatatttgccgatctttttggtaaaaatgtgaaaactgtcttgggcagtcatcaaagcaagcttgttgtattgcttgctgtttttgcttgcaaggtagtagtcgttgattcttacgccgtttgcataagcgtggtcaaccttgaacttgttggaagcagcgattgcgaactcacgcatgttgttggcggtaattgtagttttgccatttttggttgtgctttgaccagaagcggcaactttgtagctctttggtgcgaagaagctaacgtggaaattgcttacagcactgttgcggttttcaccagcatcgtagtatgggtgataattccacttaccgtttcacggtcatgttgtaatttgttgccttgatcgtaagatcagccgcagcttgaacttttgagttgaagttaaataatgccgcaatggttactgcactcgacaataaaagtgttgttcttcttttcataattttccatccaagaaaaatttactctaaattattggaaattatcggcataaagtaaatctattttttgatgataggatataatttatgtataagtgaaaattaatagatataaagaaagaagataaataagaatggttaaaagtattacacctcatttggtttatcacttgaatgggatgcaccatgttgtagcacaagttggtgtagtaaatggtgatcatgtttttgccttgcaacttcttcacagtgcacatgatgtgttggtttatagaaaacatgaaggtttaaccaagaacatcgattatactgatccacacttagtaatgatgggctttggccacacgcaaacctgggtaccagctaatgacaaggatgaatatttcgtaggtgctaaaccaaattcaggcaactggactactcaaattgcacgagtaaagtacccaagacttttaccagaaagatatacttcaaatacacaacttccacgtttgtcacacttgaatcacgtaaccgacgttccttatgatggtcatgatcacttgcacagagtagaagcttcagtttcaccaaatggcaagtatttcatgattgcctcaatttgggatgatggttcaggtcactttggtttgtttgacttaaatgaagtaaaccaaaagttgaatgaaaatggcactaagaacacgccaatcactgatttacattgcttgagtgctttccacatcgacaacttcgataatccaagtgttgctccagatgaagaaatgctacaaatgattgattcagttcaaggctatgctattgatgatgacaagaatatctatatttctaaccaattgtcaccaaagattaaccatgaaactggtgaagtaactacttggtcacgtaagattgttaagttcccatggggtgaaacaaacagtgataactggcaagtagctatggttgatggtattgatttaccagatcgttacagtgaaatggaaagtatccatgttaatgccgcaaatgatatttacttaactgtggcttaccaccaaaagtacattaagggtggagaatataagttaagaactttggaaaaccaaattttccatattactgatttgtagaataataaaaatttaaccaagtaaaaaagtgctgatgtgtctttgcttatgaagactatcagcactttttattcatattaatcagtaattctttctttaccaacagcacgttgttcggaaggattataacctaactcttcaatttcttgtcttttttctttgttattgatttgagaaagaatatcccaaaagttagacttatttttcttaatttttgaatttctgttagttttcattgttgtttccttcattttcactttctataaatataagtatactctgaaaaccaaatctatttttagctattaagatcgattaattcaaaatgaaatattttacaaaaatatatgcaatttatatgtaaatgatatacaatagtatcaaattcagaaaggagtaaaaattatggcagaaaaaacaacaggactttatgtcagaatgaatccagaaaagaaggaaaaggcagaagctattctgaaaaagctggggttaaattcagctacggcaattaacatgttctatgatcagattattcttcataatggtattcctttcagagtagagattccgaatgcatgggataatttagatcaaatgaataagtatgaatacgccaaactgcttggcgagcgcctgaacacattgagcggaaggaaagatttgcttggagatgtcgccaagaggcttgatgcggaaaagaatgaaaagaaagacaactaagttttgaggtaaaaattatgatggcaagaattattattggcattattgttgttttagttattgtgtatgtttgttgtggttttagaatcgttccacaaaataatgaaggtttggttgaaaccttgggtaagtattctaagacagtaaaagctggatttatctttgtctggccacttttccaaagaattcgcaaagttccattagcacttcaaccacttgaaatttctaagtactcaatcattaccaaagataacgctgaaatttccactagtttaactttgaactacttggtcactgattcataccgttacttttacaacaacaccgactcagttgaatcaatggtgcaattaatccgtggtcacttgcgtgacattattggtcgtatggatttgaacgcagcccttggctcaactaaggaaattaacgatcaacttttcactgcaactggtgacctgactgatatctacggtatcaaggtcgttcgtgtcaacgttgatgaacttttaccaagtgctgaaattcaacgtgccatggacaaacaacttactgccgaccgtgaaaagactgccgcaattgctaaggccgaaggtgaagctcgtaccattgaaatgaccactaaggctaagaacgatgctttggttgctaccgctaaggccaacgctgaagctgttaagacgcaggctgatgccgatgcttatcgtgtacaaaagatgcaagaagctttgtcaaaggccggcgaaggatacttcagaaaccagagtttagacagcttcaaccaattagctcaaggtcctaacaacttaatcgtggttggcaaggatgaaatgactgacttgggtaaggttcccgctttgaaaaaggtgtgggatgcaagcgacgataagaaagatgaataaaaattagctcaattctcaaatgaggattgagcttttttatacttttaacgtataccagcatcaatattaagtaattttcacactctcttgctcgccttatacttgtagtaacaattgagaacaagaggggaaagaaaattatgtttggtcgtacttattcagatttaggtccagttgttggacaaattaatggtgaagatattcgcgcaaatcaattagaaagacgtggctatgattgggaaaatggttatggcactccatccgatggccaagatactaatcgtgatggtcaaccagttagaaaattaactaaagatgccaaaagcattattatcttttggtcgtgttccggttcaactaagttgctcgcaagtaaagttgcgtgtgaaaccggtgctgatattttagaaattactttaagaaatccttatccagcaaattaccgtaaaacgctcaatcgcgctaactgtgaaagaattcaaaatgattcatcagagcttgagatgcagttacccgatttgagtcaatatgacacaatttacttaggctatcaaacttggacaatgactttgagtcagccaatgaaggcattcctacttgaatatggtggcgaattttctaacaaggagattgcgccattcctttctgaaggtggatatggttcgggtgatagtactgaattgatccgtgagtttattgcacgtgatggtggtaaaaataaaaaggtcgattggacatttgttggtccagaaaatgtcctttgtgctggcattactgataaatttgaaaaggcaggacaaaagattttcggccctaaccaaagaacggcacaattagaaggttcaaaggattatgctctgcgctttatgaacaaatatgatgttccaactgctcgccatgaaactttcaccagcgctgaaacctgtattgccgggttaaaggattttgcatatccggtggcaagggcgtaaccattgctaagaatcaagacgtcgctgaagaaacgatcagagaaatgtttgcaggtggccaaactgctgtcgtgcttgaagaatgcttggttggtccagaatactcaatgtttgtggctgtttctgaagatcaatttaccattttgccaatggcgcaagaccacaagcgagttggcgatggtgataagggtcctaacaccggcggtatgggatcatattctcctttgccacagttgaaaaaagaagatcgtcaaagaatgatcgatgagatcgtgaagccaacgatgaatggcctggttcaaggcgattatcactattgcggtgttttatacatcggcttgatgatgacagaaaatggcccaaaggtcattgaatataatgtccgcttgggcgatcctgaaactcaagttgttttgcctcgaattaaaaatgattttgccatggtgattgacgcagcggtaaatcatgaaaaattgcctgagattgaagaaaatgataattctatcttgggcgtggttgtctgcagtaaaggctatccagcgcacccggcacctaacgtgaagatcggcaagttgccagaaggtaccaatacctatatcgattatgccaatgtgaaaggcgaattggataatctgataggtgatggtggtcgcttgttcatggtgatttcggaagctgacaatttagtccaggcgcaagataatgtgtactcttatttgagtaagcttgatctgccagattgcttttaccgtcatgatattggtaatcgtgctttgagagattagatgtatgaagaaagtcccggttggggcttttttagtttggtttaatacgaacacttggtcgtatttgatgggatcaatgataaaattttctccacataagtggaggttttgaggatcagtcgtctaacgggcaagacaggcttagttaataagcaagatatgggtccaattcccgtcgtccttaatattggaataaagtaaaagctcttagttgtgaaaactaagggctttttcgtttacctaaataatttcctataaaagatctaagtgttcattctgaagatttctaatttgaaactgtcaaatcttttgtgtaaatagatctttctcgtaaattgattttttaattatttatttaatcaaagtaggattctaaggtgtcctgaacctgaccaaagcctttatgaattcgattgaaataacggtcattgtagctcattgcctgaatgccaataaaagcatcaagcgactgttcagttggaaactctgccttaggcttagctttgcgcttgatcacattgttaaatgattcaatcatgttagtcgaataaattgaagctctgatctgcttgggatagttataaaagaccagcagatctggttctatgtctttcaagcttctgataacatggctgtaaaccttgccccatttggtatagaagtcatgcaggacagctgtggcttcttctttgtttgtctgttgatgcacctgtttgaattcgttcatgatcttttcacgatcgtcgacgcgtactttagcgcagatattgcgcatgacatgaaccaaacagcgttgaaaatgagctttaggataagtcctggccaaggctgttttcatgccaacaacaccatcagaaagaaaaagctcaacttgctttaagcctcgggatttcatgttttgaagcatatctgtccagacttcaatgttctcgctaggtgcaatgcagtagtcaatgacctccttgtgcccattaggcttgatgccaatggcaatatagactgcttcacgctcaaatgtttctcggcgcaaaggaaggtatgtcgcatccaaatagacgcagaaaaacttgtcgcttagcttgcgtttgtggtaagcctcaacctttggaatcatctgcttggaaatatttgatacctgagctggactgtaatggctgccatacatcttttcaattagatcggctatttccctggtggtcacgcccttggagtaaagcttgataatcatgctttccaagatatccgagtgctgcttgtagccaggcagcgtgtgctgatgaaattgaccgttgcgatcccgaggcacttgcacttcaattgggccaaattgcgtatcaactttgcggaaataagcaccatttctagagttgccagtattccagccatttctggcatagggatcatagcccagaaaggcggtcaattcagcttctaacaagttattaacagcctgttgtagctctttgcgcaataaatcatttattttgtctggattgaatagagcttgagcaaaatctttggtaaaatcattcatgaaggagttcttctttctgtatgttttttttgttcaaaccaatcatacgagaaaggaactcctttttctaatgtttaaagaaataaatttaaggaatcattcatccttacacaaactattttacagtctcaaagtgtacacccacagcaagcttgattagtaactaaagttttgccaactatgcctaactttccaatagtagcaccatacattgctattaaaatattacctggctgattgactttcacagatgaattagcaactcctgctttcgtgattttttcagaagtatcttgaattacgctatcattcaagtcacctgtttttaaccatagaatatcaccaccataatattctggatgttgacgagaaggagttgcacctgcaccccaatctcctatatttcccaatctagaggaagtatctaataccatagtctattacgcccatccatatacttcttgcgataaaggcactgttgaaagacataatgggcttattcgcagattcattcctaagggtgattacatcaataactattctcttcaggaaatcattgacattgaaacctggtgcaattcgctaccaagaaaaatattggcatatcatacaccagatgaaatctttgaaagagaattggatcatatctatcaagcagcttaagtgttcaatttattattgcaatttacgatcagaattatttcaattcttcacatggattttatcttacattcttaaaccatctggcatcatttcttaaaacggtccaataatgtccaccaatcacaaattgccatagataatgagtacctggacagcgcagtcttaaatatgtccctttcctaataggtgttttatgaataaatttcatttgatacatagcagcacctctaggcacatatggcttatatctataaaccttctcagtagtttttacagtatgccatttttcagaatacttgcttatggcttgaactggttgagcagttgaaacacttacaccagcaaatgttaaacaaatcaatgccagcaacatcgttattttcttcataatattcttttctcctttactcccaatacaagcctattatataagagaaaatttagtatgacctagaatgttattaacttatcaaaaaagcccttaacacaggtaattgatcctatactaagggcttaaatttaatcataatagcatattcaaaaatattgagagagagtagataatacgcgtggtgctagttaaatcgttctagacaatatgccatattataagctaaaatagctatttctagccgttgttgaaaacctactaagctcctggctcgattattctcagcattgtaatagctaagcaaagaaaagtcgctttcgattgttcttctaattgccattaactgatgatcattatgctttttagcacccctcatgtttttacgatatggtgtccaaagcacgtatcccatacgctttagcttggctgctaagtcttttcctaaatagccttcatctcctaaaagataatggttaattggatgagcattgatcatcaattctaccgtctcttttgcatcatgtaccgacgccttagtaactgcgtagtcaagcagatagccatcatcactcactattgcgtggactttgaagccataatagtagatttttttcgtcgctttataaccaatatcggctatgccacggaagatcttaacgtgataattgcgaacaggctgacaaactggaatcggaaaactgtcgataatcaataattctccacctacctttacttcctgattccaaccctgacggatacaacgaattagaggcaagagcattcgagctcgacggttaaaacgagaatgagataagccaacgaagaatttacagaatcttcgttgagattcaattccaatttcagtttgccaaatgagcatcgctaagatagaactatcaggaagcttggtctgatcaacatttttacgatgtttaagtccatcaggcgcataaagcttatacagcgagcgacaaatcacatttaaccgattaaaactaacttgtaaatggtgagaaaaacgattaagcttgagatagttcaattagatcagactcttttctatttaaattacttacaacttgagtctagtctaattggacttttttattaactaaaacgatttaactagcaccacgcgttagataatattaattctttatatgtgctacctcatattaaactatattcgattgacttaatttctcttgatcttcttgaattaacaaattatataatgcgccatacaagttagcatcatttctaaactttgcactggtaattattggctttttcagcatttgctttatgatgggggtattattcataatttcatcatacgctctgttaattgtcttaattacaattggttgtgcagaaattccaccacctattgcaattttttctaaatcaacaactgtctgcatattaaaaataatagaagcaattccggcacagaatttattgaatatttcactagcctttttctcatgcttattaatctgttcaaaagccttataaccatcttttaagtcgctattgccagctaacgcattaattttagaaatcatttcgaccgccgaaaatgtaaatcccgcgatttcatgtgatttaggatcagcagaaaaacgcataaaacttaattcaccagcttgagcattaactcctaatacaagttgattatttacaacgactccgccacctattcctgttcccaaagtaatagaagcacaattgcttgtatcctttaaattacctagccaactttcagctagtacacttgcttttccatcattaataacagctattggaatacctaatttttcatatctgcgttgaaaattcataccatccaaaaaggttaaggcaccaccaaaatgaatagtattatttattatctgtcctggtgcacagaatgcaattcctttaaggttgttaaatttataaacaatatgatcaatgttttcaagaaactcttttttctttggaattgtgagagactgtaaaatagtttgtgtaaggatgaatgattccttaaatttatttctttaaacattagaaaaaggagttcctttctcgtatgattggtttgaacaaaaaaacacatacagaaagaagaactccttcatgaatgattttaccaaagattttgctcaagctctattcaatccagacaaaataaatgatttattgcgcaaagagctacaacaggctgttaataacttgttagaagctgaattgaccgcctttctgggctatgatccctatgccagaaatggctggaatactggcaactctagaaatggtgcttatttccgcaaagttgatacgcaatttggcccaattgaagtgcaagtgcctcgggatcgcaacggtcaatttcatcagcacacgctgcctggctacaagcagcactcggatgtcttggaaagcatgattatcaagctttactccaagggcgtgaccaccagggaaatagccgatctaattgaaaagatgtatggcagccattacagtccagctcaggtatcaaatatttccaagcagatgattccaaaggttgaggcttaccacaaacgcaagctaagcgacaagtttttctgcgtctatttggatgcgacataccttcctttgcgccgagaaacatttgagcgtgaagcagtctatattgccattggcatcaagcctaatgggcacaaggaggtcattgactactgcattgcacctagcgagaacattgaagtctggacagatatgcttcaaaacatgaaatcccgaggcttaaagcaagttgagctttttctttctgatggtgttgttggcatgaaaacagccttggccaggacttatcctaaagctcattttcaacgctgtttggttcatgtcatgcgcaatatctgcgctaaagtacgcgtcgacgatcgtgaaaagatcatgaacgaattcaaacaggtgcatcaacagacaaacaaagaagaagccacagctgtcctgcatgacttctataccaaatggggcaaggtttacagccatgttatcagaagcttgaaagacatagaaccagatctgctggtcttttataactatcccaagcagatcagagcttcaatttattcgactaacatgattgaatcatttaacaatgtgatcaagcgcaaagctaagcctaaggcagagtttccaactgaacagtcgcttgatgcttttattggcattcaggcaatgagctacaatgaccgttatttcaatcgaattcataaaggctttggtcaggttcaggacaccttagaatcctactttgattaaataaataattaaaaaatcaatttacgagaaagatctatttacacaaaagatttgacagtttcaatattttggattaatctgtattttgcttataataaaagcaatggtaaatatttatttttagttaatgaaaggccccaaaaatatgttatctaaaagaaattatcaagaacgtcttcggaagatggccccccaaaaaagagcgcttttctattagaaagttttctgttggagcagcgtctgttttaattggatttactttcgtgagtatggctggaagtcacaaagttcaagctgcagatgtagctgataaatctgtagtagttgacactttcaataaagataagagtcaagagctaacagaaaataagactattgcaatgccaaaagcagaaaaaacggctgttagttctgtagtacaaaaaggtgcctctgcaaataaaattgaagcagaaaatactacacaagttgataaaaatacagaaggttctgtaaaggtacaagaaaataaagacgcagtacaacctaagactgttaataatgaaaatgtattaaatgtatcaaaagcacagtctcaatctaatgaagctgtaactaagaatgcagcagaatcaaaagtagcagcactacgtgcttttagagcagcacctcaagctactcaatcacaagatgccaatgatttccaaagcttagttaatgccatgaatgatagtagcattggaactattaatattaccaatgatattactattaccggtaaagttaacggccttactacttctggtataggtgatataaacaagcactacctttatctgcagtctaaaggttcagctcgtgacttaacaattaatggtaatggtcacactatcaactttgccggttacagtattgctttacaaaacgagaactaccacaatgctgctggcccttggaacattactttaaaggatatgacgattgagggtagtaagtatggctattcaccaatttcattctatagcagcaagactaatactgaaaatagtaaattaatttttgatggtgtcactgctaacttgaatgatcgtccattagttgacaagtatggtgaaaacttaccagttcactttgccggtgataacaacattatgcttaataatatgtcaattggttacaatctagtaactggtaagactgtaaaatttgactctggtaatactacttttaatgttggtggtaaagtaactggaaatgctattaatcctgacaactgggtaattcgttcaactgaaaatgctagtaatagtgaaaatccttcaactttaattaatgaaggtgcaactgttactattaatgctaaatcagacgacttacgtggtatttatgctgggcgtcaactaacagctggtcagccaatctatggcgttactgttattaatggtactttgaatgccaacatggcagctggtcactcaactgcaatttggtcacatgatcttgaaattggtaaaaagggtaatgtaactatccataccaagcaaacaaatcaggctgatggtgttgaaaatggtacttctaattcagtaactaattataatggtacccactatgctccaatttcattaggtgttggtccaataagtagtgttgccagtccattatctaagcaaactgccagcttaattaacaatggtagtttgactattatacgtgatactactgaaaagacattggtaccattaatttcaatgggtgacggtggtttaagtactaataccacgttgaaatttttggttggtgccggtgctactctcgatttacaagacaatgcaggtacatttcaatatggtactgaacctagcacaccattgaatggtttgattactctgtggggtacgagtggtacagatttattggaatttcttaccccagcatatgtcaacttacaacgtactggtgatattcgtggtacatttattagaatggaaggtgtctacaacagtactactgttaatggaccaacaccagttgctcaatgggatcaaggtaataagactactattcctaatgatgtttggtatgtaagatacctgatatctgcgaaccaatggggtaataactctggtcaatttatgagtaaaggtcaacatcctaatactgtcgttgcgcagaaaggtgttgatacactttataactctaatgctactgtcttaatgtctaagaaccaaggcgctgataaatacgaaaacggtacaatgccaactgaagtacaacaggcactgcacttgaacagcttcttaaacaactttaacttgtggcgtccacaaagaatggctatgggtagcaagttgaatgatagtcctgacgttaagattgatgattttgataagtatcacccagaagtgcaaacgattgatggaactactcgtcaaacattaagtgatcttgatgctaataagggacttaaagatttaattggtcctgatgaacaaccaatcactgacttcaaggatattgttaagcatgttacttggtacaattctgcaactgataaggatgaatggaacaagatcatgatccagccgactgacagcaaggatccaagtgcccgagttccttatccaaaaccacaatatagtgaagaattaactccatcttatcctggtgtttccgttgagcaaggtaagtctgatagcgtagatccaagctttaaggatgaaaacgataaggctgctgatgctccagcgggtactaagtacactgcaggtgaaaatactccagattggattaaagtagatcctgatactggtaaagtaactgtttcaccaactgatgatactagtgtaggttcacatgatatttctgtaacagtaacatacccagatagcagcactgaccaattaactgtaccagtaactgttaccgaaaagagtaacttagctgagaagtatccagttagctacgacaagttaaatgttgaaaaacctagcggcgacacaccagcaactggtgcagtagatccaaaggctgctgcagatatgccagaaggtgcaatcactggttacgaaaaaggtgactttgatgctccagcgggcgtaactatcgatgtaaatcatgatactggtaaggtaactgctagtgtaggtaaaaacgcaacattaggttcatttgaagttccagttaaagtaacttatagtgacggtacttatgctgaagtaaaagttcctgtaagtatcactggtaacaaggttgatccaggtagtggtgacgttgtttactacggtgatcaaagtatggtggtcttcaatggcaaccttactactgttcacaagactactgatagccatgaattaagtgctaaagacagtgccttccaaacaatcacatattactctgattggaacaagaaaggtaacatcgttagcgactataacaagcatgtgatttacaagctaagtgctgatggtactaagtatgtaaacgaagctgatgctacggacagctttgatgctagtgcaattagctttaactggcagaagggttatgaagttaacactggtgttgataactttagcaatggttctgcagacacactttaccaacttgaaaatggtgctgttaactctgaagagcaaactgatgccaatgatccatcaggtttagcaggtaactctaagtatcgttacgactttagtattagtgatactaatgtattgcaaaaactaggtttatcacctgctggttacaatgcttgggctaatgtttactacaacttccttggtgcaactggtaaaattaatattccagtaaactatggcagtgaagtatcaactgatgaagctggtattaagaattacttagcaactaacagtatctcaggtaagacatttgtcaatggtaacccatctggtattaagtgggctgaaaatggtatgccaggtaaagatggcaaatttgctgcttctaacatgactgggattgttgaatttacttttgataacggtactaagttaaatgttcaagtaacatttaagactggatcacatgttcaaacttcaggtagtaaagttaatgacgatactaacctttatgtagaacgtacaattgaatatgatgtaactggaactggtcattcaccaattaactcagtaacacaaaaggttcactatgtacgtgatggataccacaagattaatgctgatggtacagatgctggggaaattatctggaatgaatggaaactggctgatggtcaaactgctgaattcccagaatacagtgttgaccaaatcacaggctatgatgcatatatcaatggtgcaaaggctactcaagttgatgctgccaaagttgctgaaacaaatggcacaccacaaaatggtcaaaacatcacagtaacttacaaaaagcaaaatagtactccagtaccatacaaaccaggtaaagatggcgtaaacgatgccattaacagatatgtaactcgtacaatcatcgttaaggaaccaggtaaagaaccacaaactattactcaaactgttcacttcactaatgaagataaagatggtaatagtggctacaaggatccagtaacaggcgagattaaatacaatactgactggcatgtagcaagtgatttgaaagctaagactggtagctgggaagaatatacagcaccatcagtaacaggttacactccatcacaagctaaggtagaagcaaaaacagtaactgcagaaactgaagctgctagcgtaacaattagctacactaagaatgcagatattccggtaccatacaaaccaggtaaagatggcgtaaacgatgccattaacagatatgtaactcgtacaatcatcgttaaggaaccaggtaaagaaccacaaactattactcaaactgttcacttcactaatgaagataaagatggtaatagtggctacaaggatccagtaacaggaaagacaactataaatccatggactccggctaaacagggactacgtgctgttaatgttgagcaaatcaatggttatgtagctaaagttgatggtaatgtggacgcagtagttgtaactcctgattcagctaatatggtagtaactattacttaccaagctaataaaccagaaggtcaaaacattgctgttaagaaagatacagtaccagatccagcagatggtattaagaataaggatgacttaccagatggtactaagtacacatgggagaagactccagatgtaagtaagccaggtgatgtaccagcaatagtagtagtaacttatccagacggttcaaaggacaaggtagatgttcatattgttgtggataacccaaccccagagccacaagatgttcacactactccaggtgtagtaccagacccatcaacagccatcaagaataaagatgagatgccagatggcactaagtacacatggaaagaagttccagatgttaactctgtaggtgagaagactggtatagtaactgtaaccttaccagatggcacatcagtagatgttaaggttaatgtatttgttgatcctgttaaggaaaataacaatacaattgcagattcaaacaatactaattcttctgataagaatactgcaaatgctgcaacagttaatggtaagtcagaaaacaagaagactttgccacagactggttctaagtcagatgccgctgcaattgccggtttagcagttgccatcgcaggtagcttattaggcttaggtgttaacagaaagaaacgtcaaaagtagaagaactatttataattgatccaaagaaagattaggtgataaacctaatctttttttgtgccttaatttgttatttgatcatgtttaataatttttccgtaagcgtcgtaagcgtcatataaccgagtatcttttttagtccgtatttttcaggtattctaatctcatcaatttaatggaggttaagaatatgatcgaaaaacaacaacccattgtggcacttggccgttcttctaaacctaagaaggctcgtccaccacgcaataatctgttgcttagtttaaagaagaatgacttagagctgaatttttacagcagcttagaccctgaaattatgaataagctgcttgagaaagtcttgccatgattaagctcagtgacttagggcaagtctatatcgtttgcggcaagacggatctgcgtaaaggcattgatggactagcaactttagtcaaagaacagtttgaacttgatccttttagcggcaaagtcttcctcttttgcggcggaagcaaggaccgcttcaaagccctttattgggacggacaaggtttttggctgctctacaaaagatttgaaaatggaaaattgaactggcccaggaatcaaaatgaagttcaagctttatcttctgagcaggtcgactggctaatgaagggcttcgcaatcaatccaaaaataaagaacacgaaagcgtgcgaattctactaacacttgacatcgcacgcttttttgatattcttttaactaataaatttaggaggaagtttaactcatgtcacaagaaaatttggaaaagattattgcacaacaagcaactactattcaaaacttaactgatgaaattaagctcctccgtgaacaagtagcttacttaacgcaaaaacgttatggcaaatcttcagaacaaatgcctttaaatggacaaacaagtctctttgatgaacctgatgctcaagatgacggagaacgtccccgacgccgccgttcagactattacttataaaagacaagctcacaaacgaaagcgtgctgacttactagctgcccttccagctgaagaggttcaccatgaattaggcgacaagcattgtcctgattgtcatcatgaactgattgagataggcaagcagtcagttcgccaagaattattgtttatcccagctcaacttaaaaggttagaccatatccaacatgcttacaaatgtaaatattgcagtcaaagaaatcttagcgacaagatcattaaagctgcagtacctaaagctcccctaaaccatggtctaggttcagcttcactcatcgctcattcactttatcaaaaatatgaaatgaaggtgccggactatcgtcaagaaagcgactggaagaagatgggactagaagtttcaagacagatgttaaattattgggatttgaaaagcagtcaatactactttaaaccagtgtatgatctgcttaagcaaaagctgttaatgcggccaattttacatgccgatgaaacttattatacagtcttagaaagtaaaacaatcaagacttactattgggtcttcctttcaggcaaacatgatcaatacgggattacactctatcatcatgatccttcccggagttgcaaggttgccttaaactttttaggaaactatcccggttatttgcactgtgatatgtggcaggcttatgagcaattgccgaaagcaactttagttggctgctgggctcatgttagaagaaagtttcacgaagccgtaccacaacaggcttctgaaaagtcccttgcccaaaaaggactcaactactgcaatcgcatgttttacttagaacaaacctgggagaatttgagcaaacaagaacgttaccagctaagacaagcaaagctcaagcctctgatgcaagagttcttcaactggtgtgagaaaaataaaatcaccgttttgccaggctctaaattgggaagagccattaattataccctcaagcatcaagctacttttgagcatgtcttgcttgatggcaatttagaattatctaacaataaggctgaacgcgctgtaaaatcactcgtcatgggccgaaagaattggttattttctcaaagttttgagggtgctactgcaagtggctttattctaagcttaattgaaactgccaagagaaatggccttgatcctgaaaagtacttgaattatttgcttcagaaattaccgaatgaagagattctggattcggaaacccttgaagcttatttaccgtggcaagagaagatccagataaattgtaaataaaagaacttaaataaccgtctcagtataacagtaactgggacggtttttaagtacactattttatttgacgcttacaaaatatatagaagaagtagataaacaaatggaggcattaggtgagtttttctttataacaaattattcaggaattaaggttaagtgagtatggaagaagtatttaatgatggtatttacgaatgcatagtagtagcaaccacggtagaaaaatataaggtaacttccaaagttacaattattctacaaattagagatgatattgatgccgttgaattaaaaaaactaatagaatttatgctggatataggttaaaactagaatattggcaaaaaaagatttcgcatactttcaatattaataattttcaatatttgtgttatgcgtgtggccttccgagaccgtaaaatagtttgtgtaaggatgaattattccttaatttaatttcctaaaacattagaaaaaggagttcctttctcgtatgattggtttgaacaaaaaaaacatacagaaagaagaactccttcatgaatgattttaccaaaaatataactcaagctctattcaatcaagataaaattaatgatttgcttcgtcatgaaatccaacaagctgttaatgacatgttagaatctgaactgactgcctttttaggatatgatccctatgctagaaatggctggaatactggtaattctagaaatggtgcgtatttccgtaaaattgatacccagttgggatcaattgaggtacaagtgccacgagatcgcaatggtatgtttcatcaacacactctgccagactataaacaacatactgatctcttagaagatatggttataaagctttattctaaaggtgtaaccactagagaaatagctaatttgatcgaaaaaatgtatggcagtcattatagtccagctcaagtgtctaatatctctaagcaaatgattcctaaagttgaggcttatcaccagcgtaagctgagcgataagttcttttgtgtttatcttgatgcaacgtatataccgttgcgtcgagaaacttttgaacgagaagcagtatatattgccattggcatcaagcctaatggtcacaaggaagttatcgactactgcattgcgcctagtgagaatattgaagtctggacggagttgctccagaacatgaaatctcgtggtttaaagcaagtagagctttccctttcagatggcgttgtcggcatgaaagcagcactggcaaagacctatcctcaagctcatttccaacgctgcttggtccatgttatgcgcaacatctgcgctaaagtacgcgtggacgatcgcgaggcaatcatgaacgaattcaagcagattcaccagcaagccaataaagcggctgctgttgatgtattgcatgctttttatgccaaatggaacaagagctacaatcgtgtcattagaaacctgaaagacatcgagccagacctgcttgttttttataattatcctaagcagatcagggcttcaatttactctaccaacatgatcgaatcctttaataacgtcattaagcgcaaggctaagcctaaagcggagttcccgactgaacagtcgcttgatacttttattggcatccaagcaatgagctacaatgaccgctacttcaaccgaattcacaaaggctttggtcaagtccaggataccttagaatcctattttgaataaataaaacattaaaaaaacaatttacgagaaagatctatttacacaaaagatttgacagtttcggaaaatcaactactttaagaatgatcgcgggtttggaaaatattagtaaagggactttggaaattgaccatcaagttatgaatgacgtcgcacctaaagatagaaacattgctatggtttttcagaattatgctttgtatccacacatgaccatttatgacaacatggcatttagtttaaaacttcgtcattataaaaaagatgaaattgataaaagagttaaaagagctgcaaatattttgggattacaaggctatttaaagaaaaagcctagtgcactttctggtggtcaacgtcaacgtgtggctttaggtcgtgcaattgtacgtgatgcacctattttcttaatggatgaacctttatctaatcttgatgccaaacttcgtgtagttatgcgagctgagattgctaaattacatcaaaaattaggcacaacaaccatttatgtaactcacgatcaaactgaagctatgaccttagctgatagagtcgttgtaatgtcagttggcaaggtagagcagattggtacaccacttgaagtttataatcatccctcaaatcaatttgttgcaggttttattggttcgcctcagatgaatttctttaatgttcattataagaatggaagtattacagatggtaagggcttgaatattggaattccggaaggtaaagccaagatgcttgaagaaaagggctatgcagataaagacgtaatatttggaatccgtccagaagatattcattctgaacaagcctttctggaaacatggccaaatgcagttgtagaatcgcaagttgtcgtttctgagcttttgggttcaacgattcaactgtatcaaaaagttgatggtactgagtttgtagctattgtaaattcccgcgattatcacaaaccaggcgacaaggttaaaatggggtttgatgttaataaggcccacttttttgataaagacactacccaagccatcgttaattaaatattatttttctctccccctagataaataaaacaatgctttaagatagttcactattggaaattgacaataatgaactattttttgtactaaccatctatggaaaaatgacaaagtaaatttgcaagaatagagttttattttaatattaatatttactagatatagattaagcaatgaaatgatgattttaaagtggtatgacacagattataaaacaggacatctgagaagcggtaatatggttaccatatttatgctgatagccactgttgccaagattgaagtaatcttaaatagtaatccacattggtgccttccaccatttaatgaatttttgtttagtagtgagataaagcgtagtgtgtttaagcctgatgatgagttgaaacaatttattagagattttaataagaaacaccaaaaacaaaattgataaatttccacttgtaactactattcttgtttaatatcttttgatatagttttaaacaagaggaaaaacaaatgttttgtcttaaatcattatttaactcatgagaatgtaaatacgataatcaatggtttaaaatcttcacgacgtccattttttatttaacttaagagaattacaattaaagctccaatcggggcttttttctttttcattaaacttcctattaaaagattacccttgaaactggtaaaatagataagtaagtatagagaacaatttttataaaaggggaataaaatggcagataaaaaattacttctaatcgatggtaactctgtagctttcagagccttttacgctctttatcgtcaactagaatctttcaaaagtccggacggcctgcacactaatgccatttatgcttttaaaaatatgcttgatgtccttttgaaggacgttgatccaactcacattttggtagcttttgatgcaggaaaagtaacttttagaacaaagatgtatggagaatataaaggtggacgtgccaaaactccagaagagcttctcgagcaaatgccttatattcaagaaatgcttcatgacttgggtattaaaacttatgaattgaagaattacgaagcagatgacattattggtacttttgtcgataagggtgagaagaacggctttactactactgttgtgactggtgaccgcgacttgactcaactcgcttctccaagcactactgttgaagtaaccaaatcaggggtttctcaacttgaagcctacacgcctgaacatatgaaggaagttaacggcgtcactccaactgaattcattgatatgaaggctttgatgggggataattccgataactatcctggtgttgaaggtatcggtcctaagacagcctctaatttgattcaagaatatggttcagtagaaaacttatacgatcatattgatgaaatgaagaaatctaagcgtaaagagcgtttaatccgtgacaaggacaaagcatttttagctaaaaaacttgccacaattgaccgtgattcaccggtaactctagatatcgatgatataaaacgtcagccagttgattatgaaaagctgcgtcaattctatgaaaagatgaacttccgtaagttcttagctgatttaaatgcttcaggtgccggtcaagatagtactgaagttgaaaaagtggaatacatcgttttaaacgacgacaacgttaaggatgttaaggctactgaagatgacaccattgagttttatctagaaatgctcggtgctaactatcacttagctccttttgttggcttcagcttgaagatcactgacaagatctacgtttcaagagacgtggaattgcttgaagaagataatatcaagcacatcttagaagacgaaaagattaagaagaatgtctttgacctgaagagaacaatggttgctgcacatcgtttggacattcacactcacggccttgattacgacatgcttttggcatcctacttgatcaataatgaaaataactctaacgaccttggtgaaattgcccacctttatggtgattactccgttaagactgacctcgaagtttacggaaaaggtaagagcgagcacatccctgatgacgatgatgaattattcaaccacttagcttctaagatcaatgctatcgaatcacttaagaagccactgcttgaaaaactcaaggatcatgaacaagacgacctatttgaaacaatcgaaattccaaccgcgcgcgttttagccagaatggaaatgaacgggatgaaggttgaagcaagtactttaattcaactgcaaaatgaatttgccgttaaattgaaggaactcgaagacaagatttacagtcaagctggtgaaaagttcaatttgaattcacctaagcaattaggtcacattttgtttgaaaagcttggtttaccaccaatcaagaagaccaagactggttactcaacttcagttgaagtcttggatcaattaaagacgcaaagtccaatcgttagtgaaatttgggattaccgtcaaattgccaagattcaatctacctatgtaaagggtctgcttgacgttatccaatcagatggccgtgttcacacgcgttacttgcaaaccttgactgcgactggtcgactttctagtgtggatcctaacttgcagaacatccctacccgcaccgaagaaggaaagcaaatcagaaaggccttcgtgccaagcgaaccagacggctacatcttctcttgcgactactcacaagttgaactccgtgttttagctcacgtttcgggcgatcaaaacatgcaagaagccttcaagaccggatacgatattcactcacacaccgcgatgaagattttccacttggattcaccagatgaagtaacgccattgatgaggcgtcatgctaaagccgttaactttggtattgtttatggtatttctgattatggtttatcaaagaatttaggtatttctagaaaacgtgctcaagagtttattgacaattactttgaacaatatccacaaattcgtgaatatatggataaggctgtgcaaacggctcgtgaaaagggctatgcagaaacaattatgcacagaagacgctacttgcctgatattcatgctaagaaatttacagttcgttcttttgctgaaagaactgcgattaactcgcctattcaaggatcagcggccgatattatcaagattgctatgatcaatatgcaaaagaagctagatgaactacatttgaagaccaagatagtcgttcaagtacatgacgaattgatttttgatgtgccaaaagatgaattagaaacgattaagaagatagttccagaagttatgcaatcggcagtgaagcttgatgtgccattgattgcagattctggttggggtcataattggtatgatgcaaagtaggtgatttaatgccagaaatgcctgaagtcgagacggtgcgacggactttaactccgctaatcgttggaaaaacgattaaaaaagtagtactttggtatcccaaaattgtggcaacagaccataagaaatttatcaaagaactaccaggtaaaagggtcttaaagattgatcgctatgctaaatatttactgatacgcctaagtgataatttaactattgtgtcacatttacgcatggagggaaaatatcatttaaccactcccgatgcgcctaaggataagcatgaccacgtagagtttatttttactgatcaaactgccttgcgttataatgacgtgcgtaagtttggccgcatgcagctgattttaacaggtactgagcgccaagtgacggggattggcaaactgggccctgagcctaatagcatagaattttcgtcagattattttatcaaggccttgagccgtaagaagaaaaatattaaaaatgtcttgcttgatcaaacaaccgttgcaggtttaggtaatatctatgttgatgagacactgtggcagagtggaattcatcctttgagtgccgcaaataaaattccgtcagaaaaagcaaaagagctgtggcagaatattaaccaaactattaaaattgcaacaaaaaagcgtgggacgactgttcatacttatttagatgccaacggaaatgttggtggctatcaagaaatgctcaaggtttatggtcatgcaggtgaaccttgtgcaaagtgtggcacggaactagaaaagattaaagtatcaggcagagggacaaccttctgtccacattgtcaggtggtttattaatgagctatgttttagccttaactggtggtattgcaactgggaaaagtacagcggaccagttttttaaagcaaataaaattcctgtgatcgatgatgatcagattgctcatgatttgatggagcctgggcaagcttcttggcaggcgattaaagattattttggctcagagtatttaaatgatgaccaaacgattaatcgaaagaaattagggcaattggtatttaaggattcgcgggctttaactaaattaaatgagttaacgcatccgttgatttttttgcaaacaaagaaattgctaaatcaatatcaagctcaaccaatagttattcttgatgtcccactttattttgagtcagggatggataagaaagatatagctgacggtgttttagtgattactttgcctgagaaaatgcaattacagcgtttgaaggagcggaatcatttaaccgatgaagaagcaagaattcggatgcaaagtcagttgcctatggtcaaaaaagagcaattggctgattttgtgattgaaaatactggtacaataaaagaactagagaataaactagcacaattattggtaaagattagagaagagggatagctatggaatgtccaaattgtcatcaaaatgcttctcgcgttattgattcgcggcctagtgatgaaaaccgggctattagacggcgcagagaatgtgaaaattgttgttttcgctttactacttttgaacgagtggaaactgctcctttgttggtagtaaaaaatgatggtactcgtgaaccattcagtcgaaagaaaattttgcacggagtaatggcagccggacaaaaacggccaatcagtagtgaacaatttgagcaattggttgatcgtgtcgaaaataagataagaaaacaaggcgttagtgaaatttcatctaagaagattggtcagtatgtcatggatgatttggctaatttggatgacgtagcttatattcgctttgcttcaatttaccgtgagttcaaggatatgtctagctttatgaagacaatggaagatatgatggccaaaaaaggaaagggtaattagtcatgtttgcaacgtctgatcctaagcatctttattatgtagccaacaagattaccctttttccagagaatgagaaaatcttgattaaactgtatcagcctttggttggcgcggtggcaattgccttgtatcagactttaatcaatgactatgatccatatggtattgtttctgatgcaaagggaatttattcactacaggagcaacttgattgtagtttaaaagatatgtttcattctttgcataaactggaagccgtaggtttagtgcaaacttttttagcggataatgtcttcaataatatcattgtttttaagttattacaggttcctagtgcagacaaattttttgcaacaccactgctagcaagtttgttgaaagaaaaagttggcagcccaacctttcatgacttgagtcatgcttttgctaaggaagcaaaactgcgtgaaaagccaatcaagaatgcgcgcgatgtctcagccaacttttttgatgtttttcgcttgccaggggatgaagcaattaatccatctaatgaggtagtagaagctgcgcaggaaaataaagcgcctgaggtagaaactgctgaaattaatgcccaggatccaattgattgggatctgattaaagatcaatataatgtctatcaaattccagctcaagaagtagaaattaaaaagaaccaaattcggggcttaatacagacatataatttatcggaacaggaatttgtggatgagactgttccctgtttgcatggtacacataaattaaacatgcatgaaattagtaataccatagcagaaaattataaacgattgcatactagggaaaacattcaaaaacaaattgaagaaggcaaaaagcgcgctattgcgactatcaaaggtttggacgctaatgatagaaaactgttactcgaagctaatgaaaattccccatctgaatttttatacaaattaaaaactgaaaagggtggaattgtagctccaggcgaaaactatattattaatcagctgcacacgcagtatggcttgccggaagatttgattaatattttgattcatacctgtttgacctacgatactgttgtaacttctaatcgtgcttatcgaatagctaatgattggctgcaaggtggtattagtactggggtacaagctcttgaatatgtgaagaagcgtaaagccgatattcttaaaaagaaaaatcgacagtcatatcgacaaaataagcgagtcgaaaaaggtaccgattggagcaagaaaaaggctaaaaatgaaggtatgtcaatagaacagctgaaggatatctttaaggatctgaaaaataagtaaatagagggtaggtgaaataatggaagcaattggtgatttgcttaaaaaaatagttaaagagcgtaatttaggtaatgagaaagaactgttgaaaactgctttacacgatccagatgtgcaagcgtttttgcaggcaaatagggaaaaaatagataaggcgatgattcgaaatagtatggccaatatctatgaatattatgcgcaaaaacatagtcagaatcaggtgctggccggttatgctccgcaattatttttgaacggcaaagtaattgatgtacgttacaaacctaccgaggctaagattgtagcagatcagcaacgagcagccaagcggcgtcttcatttaattgatctgcctgctaaattgcatgatgttaatttaagtgatattgaggttacaaatgatcgccagcaagctttaaccctgatttatgattttttgaaaaagtacaaagctgatcctcaccaacaaggcctttatttgtcgggcgactttgggatcgggaagacctatatgctagcgggacttgcaaactatgtagcaactaattttgatcggaatgttgtatttttacatgttccaacttttattgcaggtttatcaagtcattttggtgataacagcttgcaagatgagatcaggaatttagctgaatgcgatgtcttaattttggatgacattggggcagaaacattaagtcagtggtcacgtgatgacgttttaggagtaattttacaggcaagaatggataatgttttgccaacctttttctcttctaatttagatatggaagcattagagtcacactttgaggaaacccgtaatgcaactgatccagttaaagctaaaagattaatgcaacgagtacgttttttagctaaagaagtagtagtttccggtcccgatcgacgaaatttttcgcattaatttcaaaaagttcttgcatcgttcactttgatgcgtataattgaagttaattaaacgagacatgatgatgttcggctcagagagaaggacctagttctggaagttcttcattagaaaatcaccccaatcgtttattcccaaaattgaattttaagaggctggatacctttatcaatctatacgagaggttagacgtacgctaacctgaattttgggtggaaccacgcaattaacacgtcccagtgcttttattagcactgggatttttttattggaggtaaaaatatgagtttttcaattactttgccagacggttcaaagaaagattttgataaggctgtttcagttaaggaagtagcttcatcaatcgctacatctcttggaaaagctgccgttggtgctaaagtaaatggcgttgttaagccacttgattatgaaattgacaatgatgttgaagttgctattcttactgacaaggatgaagaaggcttagacattttaagagctactgctgcttttgcacttgaagcagttgctaagaacaagtacccagaacttcgtttgggtcaacatgttgctgatgaaggcggcttttacgtagatactgacaaagatgaccaaattaaggttactgaattgccagaacttgaaaaggctatggaaaaattagttaagagtggtcaagcaattgaacatgttgtaatggacaagtcagaacttgaagatattttcaaggatgacccttacaagactgatcttttgaagaaaattgatgctgacaaggttgatgcttacaagttaggtgatttcgttgactttggctttgatgctttattgccaaacactggtaagattaagcacttcaagcttttgtcagttgctggtgcttactggcttggtaaatcatccaacccaatgcttcaaagaatcttcggtactgctttcttcaaggaagctgctttaaaggaagatttgaagcgtcgtgcagaaattaaggaacgcgaccacagaactatcggtcgtgaccttgacttcttcttcgttgatcctaaggttggtgctggtcttccttactggatgccaaagggtgctactattcgtcgtgttgttgaacgttacattatcgaccgtgaagttgctgacggttatcaacacgtttatactccagtattaatgaaccttgatgcttacaagacttcaggtcactgggcacactaccgtgatgacatgttcccaccaatggacatgggtgatggcgaaatgcttgaacttcgtccaatgaactgtccttcacatattcaaatttataagcaccacattcgttcataccgtgacttgccacttcgtgttgctgaacttggtatgatgcacagatatgaaaagtcaggcgctttgtcaggccttcaacgtgtacgtgaaatgactttgaatgatggccacacttttgttgccttggatcaagttcaaactgaattcgctaagattttgaagttaatcatggacgtatacaaggacttcgatattactgattactacttcagactttcataccgtgatccaaagaatactgacaagtactttgcaaatgacgaaatgtgggaaagaagtcaaaagatgcttaagggtgctatggatgaccttggccttgactatgttgaagctgaaggtgaagcagcattctacggtcctaagcttgatattcaaactaagactgctttgggtaatgacgaaactatgtcaactatccaacttgacttcatgcttccagaaagatttggcttaacttacgttggtcaagatggtgaagaacaccgtccagttatgattcaccgtggtattgttggtactatggaaagattcattgcttaccttactgaaatttacaagggtgcattcccaacttggcttgctccagttcaagttaaaattatcccagttaaccttgatgctcatggtgaatatgcagaaaaggttcgtcaagaacttgctaagcgtggcttcagagcagaagttgatactcgtaacgaaaagatgggttacaagattcgtgaatcacaaacccaaaaggtaccttacactttggtgttaggcgacgaagaaatgaagaacggtagcgtaaacgtacgtcgttacggtactgacgaagaaatttctaagagccttactgattttattaatgaaattgatgcagatgttaagtcatactcaagagaaaattaattaatataattaaaaaaataaaataaaaaaacgtatgctatgccaggtctaattaagatggctttattgcatacgtttttttggtaaagctaatgtaattgattttttacgtttgtaagtaagaagtaaaagaactgtcatcccctttaacttttatgaaatattttaatgaaataatgaaaataggagttatataaggaaaggtgataaacttgaaaaataagctcattatatttatgacaactgcgctattcatgttagctattattgtaatgggtcaaaatagagtagatgctgcatcctggggagctaagaatttatttactacaccaaaggaaactcgcggaacatggtactataagcaagaatgcaaaataaagaagcttaaaattacaacgcatacatttaataaaatcaaattatataaaatgttgagcagtaatcaagcgattaagtggactaaaaaattagctaaaactgataaaaagtcggggtataaattagctcaaaaagttggtacctctcaatacgaagctactgattttaaattttataaaacagcaggttttgctgccaatggttggctttctagtgatagagctgattcaggacacacttatgttgctataaagaaaaaagataaaagtaataatgataaagtagatgcactgcggagactgtcaaattttttgtgtaaatagatttttctcgtagattgattttttaatcttttatttaatcaaagtagaattctaaggtatcctgaacctgaccaaagcctttgtggattcgattgaaatagcgttcgttgtagctcattgcttgaatgccaataaaagtatcaagcgactgttcatttgaaaactctgctttaggtttagctttacgcttgataacgttgttaaaggattcgatcatattggtggagtaaattgaaaccctgatctgcttaggatagctgtaaaagaccagcagatcaggttcaatctctttgagatttctgatgacatggttgtacgctctgttccacttgtcatagaaggcgtgcaagactttgatcgcagcttctttatttggctgttgatggatttgcttgaattcattcatgatattttcgcgatcatctacgcgtactttagcgcagatattgcgcatgacatgtaccagacagcgttgaaaatgagctttgggatatgtcttttccagtaccgtcttcatgcccacaacgccatctgaaagaaagagctcaacctgttctagaccgcgagacttcatgtcttgaagcatttccgtccaattctcgacgttttcgctgggagcaatgcggttaatcgatgacttccttgtggccattaggcttgatgccaatggcaatataaactgcttcacgatcaaaggttatgcgacgcaaagtaatgtaagttgcgtccaaataaatacagaagaacttatcgctaagcttgcgttgatgataggcttcaacttttggaatcatctgcttggagatgttagatacctgagctgggctgtagtgactgccgtacatcttttcaattaaatcggctatttctctggtggttacgcctttggaatatagcttgataatcatgctttccaagacatcggagtgctgcctgtagtcaggcagcgtgtgctgatgaaacatgccgttgcggtccctaggcacctgaatttcaatctcgccaaattgcgtatcaactttacggaaataagcaccattgcgtgaattgcctgtattccagccagctctggcataaggatcatagcctaaaaacgcagtcagttcagcttccaataagtcattaactgcttgctggagttctttgcgcaataaatcgtttattttgtcttgattgaatagagcttgtgccatatttttggtaaaatcattcatgaaggagttcttctttccgtatgtgttttttgttcaaaccaatcatacgagaaaggaactcctttttctaatgtttaaagaaataaatttaaggaatcattcatccttacacaaactattttacggtctctccaaagaaactgtcaaatcttttgtgtaaatagatctttctcgtaaattgattttttaattatttatttaatcaaagtaggattctaaggtgtcctgaacctgaccaaagcctttatgaattcgattgaaataacggtcattgtagctcattgcctgaatgccaataaaagcatcaagcgactgttcagttggaaactctgccttaggcttagctttgcgcttgatcacattgttaaatgattcaatcatgttagtcgaataaattgaagctctgatctgcttgggatagttataaaagaccagcagatctggttctatgtctttcaagcttctgataacatggctgtaaaccttgccccatttggtatagaagtcatgcaggacagctgtggcttcttctttgtttgtctgttgatgcacctgtttgaattcgttcatgatcttttcacgatcgtcgacgcgtactttagcgcagatattgcgcatgacatgaaccaaacagcgttgaaaatgagctttaggataagtcctggccaaggctgttttcatgccaacaacaccatcagaaagaaaaagctcaacttgctttaagcctcgggatttcatgttttgaagcatatctgtccagacttcaatgttctcgctaggtgcaatgcagtagtcaatgacctccttgtgcccattaggcttgatgccaatggcaatatagactgcttcacgctcaaatgtttctcggcgcaaaggaaggtatgtcgcatccaaatagacgcagaaaaacttgtcgcttagcttgcgtttgtggtaagcctcaacctttggaatcatctgcttggaaatatttgatacctgagctggactgtaatggctgccatacatcttttcaattagatcggctatttccctggtggtcacgcccttggagtaaagcttgataatcatgctttccaagatatccgagtgctgcttgtagtcaggcagcgtgtgctgatgaaattgaccgttgcgatcccgaggcacttgcacttcaattgggccaaattgcgtatcaactttgcggaaataagcaccatttctagagttgccagtattccagccatttctggcatagggatcatagcccagaaaggcggtcaattcagcttctaacaagttattaacagcctgttgtagctctttgcgcaataaatcatttattttgtctggattgaatagagcttgagcaaaatctttggtaaaatcattcatgaaggagttcttctttctgtatgtgtttttttgttcaaaccaatcatacgagaaaggaactcctttttctaatgtttaaagaaataaatttaaggaatcattcatccttacacaaactattttacagtctctatccaaagcgcgacttgcttttctcattaatatcattgataaagcagagataataatcagaactattgcaataacacttgcatttttccagttacctaatgtcatggcttgttggtaaatcaaggtagacattactaaatttttattacctcccaaaatttgtggggtagtatatgctgtcatcgcacctgcaaagaccaaaatgcatcctgttaaaatccctgagactaattgtggtattacaatttttatcaaattaacccatggattggcgcctaatacagcagcagcttcttctgcttcaatgtttagctcagaaatactaccaactaatgaaataatcataatcgggagaaataaataagctgaaccgatgataattgccgtatcagtataaagaatgtttaatggagaattaattaaatgaatagacatcagaaatttatttagaataccgttacgacctaaaataatgatccatgcaaagtttctgacaactgcattcgttaacattggaaaaagaatgataattgttaaaattgatcttactttgctcttttgacgagcaatccaaagtgaaattggaattccaagaattaaaacaatgatcatagtgagtaaagcaattttaaatgttctaccaattacatgaagattgtacgtgttttttagaaattcagtgtataggtgcaaaaatcctttagaatcttgaaatgttggtatagcaatctgaattaatggaaagaatgcaaaaatcaagacactaataaatgccggaaatagcagccaaaaactggattttattttcatattgttcgtattcctccttatcttgtcttagaataatttaaatgtaaaaataagtcaatacaaaatatgaattaaaataataacatttgtgttaattgtatgcgtattgtattatttatgaatataaatagatttatttacgcgtggtgctagttaaatctttctagacaataagccaaattataagctaaaattgcaatttccaaccggctttgaaagcctatcagactacgtgctcgattgttctcggcattgtaataggtcagaagcgaaaagtcgctttcaattgttctgcgaatagccatcaattgatgatcattgtgctttttagctcctgtcatatttttacgatatggtgtccaaagttcataacccatttgttttagctgttgatgcagttctttgcctaaatagccttcgtcgccaagaagatagtaattagatggatgtgcattttccatcagttcaactgtctccttggcatcatgaactgatgcttttgttacgacataatcaagaatgtaaccgtcatcgctaacaatggcatgaactttgaaaccatagaagtaaattttcttggtggccttataaccaatgttggcataaccgcgaaaaattttagcacgatagttgcgaattggttggcaaacaggtaccggaaagctgtcaatgatcaagaaatgtccattcaggtcaacctttttattcatttcttgccgtatctgataaatcaattgcaatagctgacgtgaacgccgattaaaacgtgagtgtgataaacaattgaaacattcacagaatcttctttgtgattcaattcctgtcttagcttgccagataagtaaagccaaaatcagactgtccgtagttttaatttgatcaatatttcgccgatgagtaaactcagccggtgcatacaaacgataccagtgccgacaaattatcactaaatctttaaaactaacttgtaaatggtggctaaaacgcttaagcttaaggcagttcaatcagatcagactcttttctattattactatttacaagtcgagtctaacaagattggacttttttattaactaaaacgatttaactagcaccacgcgtatttatttataaatttatcttcttgaaaatacgaacattaccaaaaaggaagtggagttcttaatgaaaaagccagttattattagtacagatccaggaatagatgacgcagttgcattagcaatatgtcttttttcgcctgcaattgaagttaaaagtattattgcaactaatggcaatgttaatgcgcaacaagctttaataaatatattgaaattggagaaatttttcggtaaaagtattcctgtagtaaaaggggtagagcgttcattagtcaaacaatctattcgagctaaagaaatacatggtaaatcaggaatggacggatatgattttccaaatcctagttttgaattggtggatcatggcatatcaccggttgccatacataaaatagttgcagcttcttctgaaaaagtaactcttattggaattgcaccacttactgattacgctctatatgttcgtttatacccagatgatataaaaaatattaaggaactaattattatgggcggagcaatgggtagaggtaattatggtatctattctgaattcaatattgcatctgatcctgaagctgcaaaaatcatttttgaaagtggattaaaaattagagtagcgcctttagaattaggtgcacaagctaaaattatgcctgaagtaagtaatcaaatacgacagttaggaaaagctggtgatatgttttacgacttatttaagaaatttcgaggtggcagttttcaaactggccttaaaatttatgatgcacttgcagcaggcgtacttttaaatccgcaaatgtttaaatttaaaaatacacatgtagaaattgatgttcaaaccggttatacatatggtgcttcattgatggattttaaaaataagctagatcttccaaataatgctgaaatagcagtgtctgtagatccagaaattttttctaaatggtttgtagaagctttatcaaaaacaagataaaaaagtcaattaattgtcaacaattaattgacggataatggttaagcgagtatactactactagttgagaacaagaagaagcacccgcttctcgcctaagttaagtaaacctctaggctgattgataatttctgttgattaaaggcgggtatgattcttataacccgcctttttcttgtcctcaaattaacacggaggtgaacagttataccaagaagtttaatcttaaacgacagaattcgcgctcgcgaagttcgtttaattgatgaagatggtcagcaagttggtgtgatgagtaaaagtgatgccttacgtcgtgcaagcgatgcaggtcttgacttagctctgatttctccaaatgctaagccacctgtagcacgtatcatggattacgggaagtaccgctttgaacaacaaaagaagcttaaggaagcccgtaagaattccaagacagtcagtgtcaaagaaattcgtttgagtccaactattgaaggtaacgacttcgaaactaaacttaagcacgttcgtaagttcatttctaaagaaggagctaaggttcgcgtctcaattcgttttagaggtcgtgccatcactcacaaggaattaggtcaacaagtacttgaaaaaatggccgaagtaacctcagacattgctaatgtaattagtaagcctaagatggaaggtcgttcaatgttcttgatgcttgcacctaagagtgataaggacaaaaagaaaaagtagttaattggaggaaatagaaatatgccaaagatgaaaacacaccgcgcttctgctaagcgttttaagagaactgcaaatggtggtttaaagcgtcaccacgcatttactggtcaccgtttccacggtaagacaaagaagcaacgtcgtcacttgagaaaagctgctatggtttcaaagagtgatatgaagcgtatcaagcaaatggttgctcaaatgcactaatacttgttcttaattaagacagactatagtaggaggaattttaaatgccaagagttaaaggtggaacagtaacacgtcaacgtcgtaagaagatcatgaagcttgccaagggttaccgtggcgcaaagcacatgcaatttaaggctgcaagcactcaattattcgtttcatacaagtacgcattccgcgaccgtagaagacgtaagagtgaattcagaaagttatggattgctcgtattaacgcagctgcaagacaaaacgacatctcatattctaagttaatgcacggcttgaagttggctggtgttgacatgaaccgtaagatgttagctgatattgcttacaacgactcaaagacttttgcacaattagcagaaactgctaagaaagctttgaactaataacaaaagaaataagctagggaaattttcctagcttatttttttatctatttttgaattaatgctcgtaatctaattttttcatctggcgtagtaaaggccgcgtcaaccgcgttgagataaagagtggtttcttcttcaggagtcaaggcggtcttttcttcaagcagttggtattcatgcggtaaattggtattggaaacgatcatatcatcagaatttagcgtgactttcattcccatgtgcaataatttttttattgggtaagaatcaatctgatcaaaagctttggtgttcatatttgaagtggcgcaacattccaatatgatttggtgatcaatcagatattgggtaagtgctggatcttcagtgcagcgaatgccatggccgatccgtttcgcgccaatttttaatgcttgacggattgaatcaggtcccgcagcctcaccagcatggatggtataaggaaggtgtaattcttgggcacgattgaaaaaatgctggtagttaatgtgagggatcgggccttccgcaccagctaggtcaaggccaacaacgccatgacctaaaaattctttcgctagctcaaccgtttccatgttttctttttcattgtgggcgaagcgcatcaaacagagaattaaaccagcgtgtaattcaggctgatctttgtctgctttttgtttttgataaaacttcgtaataccgctgactgctgcagcgattacttgtctttgcgttaaaccatttttagtatgtaattgcggtgcaaagcggatctcggcgtagactagaccttgttgttttaattcgcaaagaagatcaaacacaatcatctccagatcatgctttgtcttcattaactggttaggtaagtcaaacttttccaaaaattgttccaagctagcgcaagaattatcaactgacaattcttgccgcaatttttgatcagttaactgtggcatgtgatgttcctgcattaacttcttaacagtagcaactgggacagaaccgtcgaggtgaaggtgtaaatcgatgaattttctcatggtgatcctttctgttgattgatgattttgcttaaattgtttagtattgtaacactttttcatcagaaaaaaacaaaaatttctaaagcaaacccatttttgatatgatataaggtgataaaaaatggaggaaattaacagttaaaagatagacaagatacaaagatctgttcagaaatataaaacatagaagcaggtcaaaaactaaaaatttaatattttgttcgcttgtatttatttcactctttgctaaatttatgtttgtattggaggtgaaacaaatgatcaaggctcaagtagtcgaattaaaacctaacaagaccatgcaacaagagctggataagctttgtgattatcgcagatattgctggaatcaagctttagccacttggcaagacatgtatgaagcacgaaccttagataaggataataatcccagtccaaatgagcgcagaatacgtgatgagctagtcgataataaggcagactggcagtttgctctgtctgctagatgcttgcaattagcagtcaaagatttggctaatgcttggaagaatttctttgataaggcacagcctgattgggggaaaccacatttcaaatcaaagaaggccccgcgacaaggctttaagactgaccgggctaaagtggttaatggtaagctacgcttagacaagcccagaggcattaaaacctggttcgatattccaacatatgaagctttaaaaatgaagcaaattaaagttgctagtgtctttagagaaagaggacattattatgccgctctttcttatgaagaagaaactttggtaaagcctagaacaggtagaaagacagctgttgatgttaatgtgggacatttcaactacactgggggcaaaatcaatgttttgccatcaagattgcaaaaactatacaagcgcattaagcattatcagagaatgctggctaagaaaagacgggctaatggcaagttagctggccaaagcaataattacgtgcaagtgagaaccaaactgcaacgtgattatcgtaaagtagccaacattcaaaacgatcttttgcaaaaattcactacaaaattggttaataattatgatcaaatagtgattgaagacctagccgttaaacaaatgatgatgacgcacgtcgcttcaaaaggcatgcagagatcattattcagtaagtttagacagatattgacttataaatgtgagtggtatggcaaagaattaatcttggctgataaaacatatccatcaacccaaagatgtgctaattgtggttatgttaaaaaaggtgatgaaaaaatcactttgcaaggcaaccaaaaacatcacactaagcacaatgagtatatttgttatgaatgcggttatactaatgatcgtgatgataatgcagtgttaaatcttttagctttagcaaaataatgaaaacggggctggctaagcccttaagctgcaagagttagtcaatgcgattactcctagattggaatattggaatactaatgatgacagcagtaaataaagcgaagaaaggaaggactatatttctttctgatatgtaaaaaaatatacattcttctacatatttctatgttttatatagcagtgttgatatgctttttagaccaaaatatacaattgatacgatttacaatctggacccccagaagttgaatgaaatggacattaaggcggttttttcagacctagataatacattgctcgcctggaataaatttgaaactgccaaagaaatggataattttaatcaaaagttagccaaggcgggaatcactctcgtggtcatttctaacaataatgctcaaagagtgggcaaggtacttgatccttaccatatcgaatttgtcgctaagtcacgtaagccattgccatttgcgatcaccaagaagcgcgaagcaatgcatttgcaaaaagatcaggttatgatggttggcgaccaactaatcactgacatgcaagcagggaatttggccggcgtgaagactgttctagttaagccattagttgaaactgataagtggaatacgagaatcaatcgtttctttgaaaaaattatctttttcttcctgggtttatcacatcgagtaacatttaagaaggagctatcaaatggatgaggatattatttgtatcggctgcggtgccaagctgcaatccgatgatcctgaaaaagcaggttatctgccaaaaagtgcactagataaggcaaagcaagaagaaaatgcggatgtttattgtcaacgttgcttcagattgcgccattataacgaaatcatgccagttgatttgaacaacgatgattttttagctttgcttaactctttaggacaaaagaaagctttaattgttaatgtagttgacttatttgatttttcaaattctttgctatcatcattgaagcgttttgttggaaataatgattttattttagttggtaataaatttgatctatttcctaaaaactctaagcaaagtaagattaaggattggatgagacaagaagctaaccgaatggggctttatcctaaggaaatcttcttggtttcagctaaaaagaagttgaacttggaagatttgatcgcttatattaataagcaatcgcaagacaaagatgtctattttgtagggacaactaatgttggtaagtcaactttaatcaatgccattattgacatgatgggtgatattcaagacctgatcaccgcttcacgctttcctggaactactttagacaaaattgaaattcctctagaaaatggtcactttttgattgatacgcccgggatcatgaccgagaatcaattggctacgcacttaaatgctaaggatttggagctggtctcacctaagaagcctttaaagccagctacttaccaattattgcctggtaatactttattcttagctggtttgggacggattgattatctcaagggcgaatcgactagctttactgtttacgttgctcgtggaatgtatattcaccgtactaagacagctaatgcggatgacttttataaaaagcataaaggtgaattgttatccccaccagctgcagatgatgaaatggcaccactaaagggtcaagaatttagaacggaatataagagtgaccttttatttggtggaattggttttgtgactgtacccaagggatgcgttgttaagacttacacaccagatgggattggtttaggtattcgtcgtgcattgatttagaggtttgcatatggttaatccaaaatgtattgaaaaaatgccaactgctaaagttgaagcagaattggaacaagaacaaggtaaaggtcgtcagattgggattatgggtggtacctttaatccggtgcatattgcgcacttggtagcggcagagcaagcaatgactaagttgaagctggatgaggtctggtttattccggataatattccaccgcataaaaatgctccgctgacttctgctaaagatcgggcaacgatgcttgatttagctacgcgcgataatcctaactttagggtaaaactattggaattgttccgaggcggcgtttcttatactgtggatactatgcgttatctcaaggaaaaagcacctcagaatgactattatttgattatgggcagtgatcaggttaacagtttccatacttggaaggaagctccgaccctggctaaactagtaacattggtcggaattcgtcgtccaggttatccacaagatccgcaatatcccatgatttgggttgacgcaccagatattcgcctaagttcgactgctattcgtcgcagtgtcgcaactggcacttcaattcgttacttggtaccagaagccgtcagagaatatattgaagaaaaggggctttaccttgacgaaactaatttttaaaaatacttattcaccattctctagtgaacaaattgttgctaaagaaaaggcaaacatgaagaaaaaacgttttgaacattgtgttcgtgttagtgaaactgcacgtaagttggctaagttaaatggatatgatgaagaaaaagcagccttagctggctttgttcatgattatgccaagcaggtaccggtagaagagtatcgtaaggtaattaaggaacaggattttgatccagatttgcttaattggaatcgggccatctggcatggcattgtggggattttctttattgaacgtgatttaaaaattagggatcctgagattttaactgccgtacgtcgtcatacgactggtgatactaagatgactacattagataaaattatctttgtagctgattttattgaacccggacgagattttccaggagttgaagaagcgcgcaaagttgcttatgctagtcttgatgaaggggtaggctatgaattgcagcacaccttagagtttttaattgaaaataaaaataaagtatatcctcgtactttagaagcatacaatgtatggggaattaagtaataaaaaggagaaaaatattgactagtcaagaaattttagattttactacccaagcaattagtgaccgtcatggtgaagatactgaagcttacgatatgcgtggaatcagtattttagctgattactatgtcattaccagtgcaggctctaatcgtcaattacatgcgatcgttaactcaattgttgatgcggctcacgaaaacaactacactgactaccgtattgaaggtaccagagattctaactggcttttgctcgatttaggtgatgttgtagtcaacgtctttactaaggaagcacgtgaactttataacttggaaaagctatgggctaacggtaagcaagttgaattgaaggaagattaagcaatgagtgttgttgggattattgcggaatttaatcctttccatagtggacatgagttcttgctaaatcaagcacgcttggttgctggtaatgatccaattgtggtgctcatgtctggtaactacgtgcaacgtggtgagatggcgattatgagcaagtgggagcgggctaaggtggctttgcaatctggtgccgatttggtatttgaaacaccattttcaacggcagtagaaccagctgatctttttgctctcggaaacattgaacaacttgctaaattaggcgtaactgatttagtctttggtgtagaagatgctaacctgaattttgcttatttgggtaaaagaattgcggaaattccccagaatcacatggattttagagattatagccaaacttattcaacacaatacaaccaaatggtagcgcatgaagtaggctatgaagttaatcagccaaatgctattttggggttagcgtattcagtagctaatcataatttaggttcaccattaaatctgcatccggtcaaccgaattggagcaggacatgatgaccttttacaaagagaaaaagttgtccaaagtgctagtgcgattcgaaatttattattgcatggtgaagatacaaaaaatttaaagtattggatgcctaaagcagaagcaatggtgttagctgagcagaaaatttatcctaattggaatttgctatatccatttttgaagtatcaaattgaatcatcttcagttgaagaattgcgtcatatttatcaaatgagcgaagggcttgaatataagatgaaacaagagattcatttagcccgcgattttacagaatttttgcggcatatcaagtccaagcgttatacttattcccgtttgcgccgtttgagcttatatactttgcttaatgtcactcaggatgatatattggctagctttaatcatgagtctttgatgctcttaggctttagtaaggtaggtcgcaaatatttaaagcaacagcgcaaggaatttcagacagaaatcgtctctaaagttgataaaagaagtgctaagaacggctctttagctttacaagttagggtagaccgtttatttgaacaaataatgggcgttgatcaaaactttggtcgacggccaatcgaggtgtaaaaatgttagaacttagtttttctaggattcaaaattccaaggaaccattaactcacattgaacgtgatttggaaatgcgtccagaattttttaagcgtagtaaagatctactaattgatgcgaaaaatgtaaaagtgagcggtgacttgttctatcaagaaccatttgtgactggcagttttcatgtggccgctgatctggttgtgccatcaagcagaagccttaagccggtaaactatcatgaagattttacttttactgaaaactaccttgatcgtaagccaaccaaggaagaattggaagaaaacgatactattgtacaagttgagaatgaccaaattgacttgcaaacagcggtagaagataatattttactccatattccaactactattttgactcctgaagaaaaagaaaagaatattttcccagagggtcaaggttgggaagttgtttctgaaacctcttttgaagaaggcaagaagaaccaagttaacccagcttttgctaaattgaaggtcttgcttgatgggcaagataatgataaggacaataaaaataagtaataaatgtaattgaaaaatatggtggacaatcaaagaaaatttttactttgattgttttttaatcttgtgttagaagcacttttaaagtatcctttaattataaaagcattttttaattaatttattagtattagaaaaccaaattgatctacgaggaaatgaattaacatggcaaaaattctaattattgaagatgaaaagaacttatctcgctttgtcgagcttgaattgcaacatgaaaattacgagactgttgttgagaataatggtcgtaagggattagaagatgcattgagtcaagactttgatgctatcttgcttgacttgatgttacctgatttaaatgggttggaaattgcacgtcgtgttcgtcaagttaagactacgccaattatcatgatgactgcacgtgattcagtgatcgaccgtgtttctggtttggatcatggcgctgacgattatattgttaagccttttgcaattgaagaacttttagctcgtcttcgcgcagtgttacgtcgcgttaaaatcgaaaaggacgcatcaaaggttactgttgctaagcaaaagattgtaaaatttaaagatttgacaattgaaactgctaaccgaattgtgcaccgtggtgatggcaaggcaatcgatttaactaaacgcgaatacaacttattaatgaccttgattgaaaataagaacaacgtagttagtcgtgatcaattattaaacaagatctggggtccagaatctaatatcgaaactaacgtagttgaagtttatgtacgttatttacgtaataagattgacgctccaggtcaaccatcttacattaagacggttcgtggtaccggttatatggtaagagatgaagatgatgatcaagaataaagacgaggaaaaagaggccaagcactcatccctaattgtgcgatgggttagtatcgttgcattaacgattacggtctcttttgtcatattttcagttgttgcctatcaaattgttagtcatcaatcgatggaacagcaacaagagacatctaataatgtagttaccacgatggaccggacattaagttctattcaagatgagctagagatctcaaatgtaattcctgctctgtcaccgtctaccaggcgtattttgaggggcggtcctgctattagcaaaaaagatacagagaataaagcatttagtgatagcctgatttcatcgatttcgaatccagatattaatgtagcagtttacaacaaacatgatgaaattgtttttactaatggtaattctgcacctaagctaaaagaatttgccggcaaccaacttgaagaagtagtaaaccgaaaaaaaggcaaaatgcttttaacctaccagaaaatctattctgaggtaaatggcaaattaactggctatgtagtggtttctaatagtatgacttattacaatagcttgatgagtaatttgcttcattggatggtaattatttcactgattgcaataattatcttcattgcaatttcttatattttggttgttaatgtagttcggccaattaagacgatgtctaaggtggctaaggaagttaatgctgatcctaatagtgaggctagaattaaggaactacatcgagatgatgagttagaagaattagctacttcgattaatcaaatgctagaccggatgcaaggttacattgagcaacaaaagcaatttgttggtgatgtctcacatgaattaaggacaccagtggcagtaattgaagggcatttgaacctgcttgaaagatggggcaaggatgatccgcagattttggatgaatcaattaaggcttcgttgcaagaagctgatcggatgaaacatttaattcaggaaatgcttgatttaactcgagccgagcaaatcgatgttcaatatccgtatgaagtaagtgatgttaatgaaatcatccgcagagtggtcgctgatatggcaatggttcatcctgacttcaagattcagctggatgaggatgatttacctgatgatacagagattcaaatgtatcacggtcatttggaacagttgctagtaattttgatcgataatgggattaaatattcgactgatcgcaagcagattaatgtttcagctggtgtaactaagaagaatgttaatattattgtgcaagactttggtgaggggatttctgaagaagatcaaaagaaaatcttcaatcgcttctatcgtgtggataaggctagaacccgtgaaaaaggtggcaatggtttaggtctatcgattgcacaaaaattagttgctagttataacggaacaattagtgttgaatctgttgagggtcagggcagccagtttaaattgaagttccctcggttgactaagaaaaaagccgctaagttaagaaaattaaatgagaagaaacaaatgcctaagagcaatcttgaggcataaacaaaatcctattaaatcaaggtttgggtaccaagatttaataggactttttttctctagaggcttaggtattagaaaataagaaataaaatgcttcgaaaataattataattgttcccggatttaaaattgaagtgcaacactaagtgttaaacaaaaaggccatgaagacctaaacttgaagtgacgaaaaatcaagaaaggaagatcttcatgaccaattcaaattctagcatttctaagcactatcatcaattaaccagcgtacaacgtggacaaattcaagcaatgctggattccggcataacttcccgtactgttatcgctcaagaagttggctgccataagtcgacaatcagtcgcgaaatcaaacgcggaagcgtcctgcaaagagacagcagctatttattgtatgagcactattacgctgatactgcacagatttattatgagaagcgtcgcaaaaactgctatcagcgcaatccattgaagcattatgctgtctttttgagaatgctctccagacgctttaaagctaaatttgatgccaccagcatcgatgagttcgttggtgaattccaaaggactatgccaggctacccttgtcccagcacaccaaccgtctatcgctatattgatcagggcttgctggacataagcaatattgatctgcctatgaagctcaaaagacgcaggaacaagcgtcatcacagccatggcggtcacgctttgcacaagaagcatcttggcaattccattgaacagcgtcctaaggaggttgaagacagaaaagctccgctgcactgggaaggagatctggttaaaggcgtcagacgcaagaatcagcctgctttaatgactttgactgaaagaaccacacgctttgaagtagttatcaagattcctgactatcgggcaagcacatgccaaaggctgcttcaaaaggagattgacagacatcctgcctggtttaaatcaatcacgtttgacaatggctctgagtttgcggatatgaccaagatcaagggctgccagatttactttgctcacccatattctccatgggaaaggggcaccaatgagaactgcaatggtcttttgcgtcaattcttccctaagggcaagagcatgaaagacaagtcaaaagcttatgttcaacaggcaactgatgccattaaccacaaatatcgccgaatcctccaatatcacacagcagaggaactcttcaagcaatatatctcttcataacctaactgttgcacttaatttgacaattcaggaattataattgttattaatttaagcgatttaattagctaaaaatatttaaacttaagggatgtgacataatgaaagaacgcattttttcaaggaaattctggcagaaagtttttaactatcaattgattatctggtttctcttgatgattagttatactttttctcagcggaataatcatttttattttataggggatttgttcaatctagcttttagtacggcgatcatgggattgaacttttacgtgcaatttaaaaaggattccagcaagactaatactcaaattgttcgctggctgaccatagtaatttttcctttcaatttttgccaaatttggcatatcactgggaattttttgctaaaaaacctgccggctatcgagattctattagtattactgctatgggcggtttatattttcttgctagttccaattgcagttgtacatgttggaccgattaaaaattggtttttacgcttgctaactatttactttcttgatattcagtacggtgatgcacaaaatttagcaataaatccagattttcgctggcttcattcacttacctatcaaggtgtaatcgcagctattgctttattaacgatgacttgtttcttagttaaagcttggggctatcacttcaatccaaacttaaaatttattaaaagtccaagctttcagaagaagatcttgctggctttattgatcatggcaaccattgatttgttttacaatgagtttatcaactatgataaagcaatttggacagtattctttggtgttgacattggttcatttaaattctcaattcctaatttaactgcagccattgagcccggaattttggaagaaaccgaacgctatttattgatcgtaatttttttagctggttttaatagatttccaaagtatcgcatccctgttgcaatctatggttcagcaattttgtttggccttagtcatttaagtaatttttgctggcatggagaaagttttactgcaacaattgcacaagttattggcgtaatggggagcgcctttatctgggcagaattgtatctctatacaggaaaactatggttgccgatgatctatcactttttaatggattatatttctgatttgcaatctggttggaattctgctggctggtcttggaatggcgaaatcactgattatatttatactgtattaattgttggcgttccattgctattctcaattttgatgcttttcggtaaaagaaggcaagtaatggaagataatgcagatttgattttgaatctaaacggtaggcaaagcatgatttatcagtgacttatattaaagggactataatgtatatgcaagggtaaaataattaagagaggtcataaattatgaaacttaagagaattgtattaagtattgtggctggaactgcgctttttgttcctgcagctttagcgggtcaaaatcaattaacaccggtagttcgggcaagtactctgaagaataagattacaactgttaagagctataccaatccaactttgtataataagaatggtaaagagctaggtagccaagatcggataaattttaagaaaccgatcaatttttatggtcaaccaattgttattcagggacccagggtcagtgcttttattaatcttaatgggatgccacaagctattgttaatggtgaaacctatgcagatttaggtgatggtggttatgtcaacatgaaatcggttggtagctataactggaataataatgagatcggaattattaaaaacacctatatttacaatagcaagggtaatcgtttatcaacttatcgcggtggcaaggcttatttaactaaaggtagcaagattaaatatgctggtaaaagttggactacttatcctgattcatattttaatttaggtgatgggacgtatttaaagtctaataacgttaataccatgaatggcaaaggcgttttgaagctgaatgctaacactgctatttacaataagaatggtaagcgtattagctttaatggacaacaggtttttcctaaatactcaattataaattatgctggtaagcgtcgcactaagacacaaactgacgattactattacacaaacttaagtggtagtaaatcatatgcaattaagaattataagattaaaggtcaagactattattacattggcagaggtgcttatatcaaggcaatgaatgttggtcgcatcaatggcaatccggcatttcgtgatggcggtgcaactacgattgttccgcagacagatttgtacatctataattctaaattaaagaaaactaagcaatccgttaagaaaggacaaaagattagagcggttgatccagttgttctaggcagtggtgatattgcccaactattttacagaattaagggaacatctaactatgtttcctggggtgattatagtgagtatggttttgaagatgatgagcacgtgggctactttaactttcgtgttagattaaatcctgttaaaactattgaaaatgccgctacacgggccgctgaagaatcagattaattgggagtgaagacgttatccatttggatagcgtttttattagattataggaagaggataaaagttcttggtgttgatgtttatacattgctgaatagattagtggtaatactacgatttacgattgttggagagttcgatgaaataggagacagctcaatgattaatgatttactttctgaaattagaatcgatttttggcgtgacatagggttaattattaatgatgaaaagctttttgatcgggtaactgctaattatggctatcatgaaattatgtatcaaaatattgatcattttttcatagaaactaatgacgatgatttcattaaacctaagcgaaaaacaacgtttgaagaaatttatgatttctattgcctagatcaacatataaaaaatgtgatgatgatcagtctgcaattgtttgaacaaagcttcaaagtagcccttgcagaaacagctcttattgagaatggtaaaaatttcaccagaaatcttaatccacgaacaattcatcaaaggcagtttctaaatgaaaaatatcaattaaaagatgggcgagtaattcaccgcggtgatgtgaaagcgcgcatgcggcatattaagcaaaactatcttgagccatatgagggatatactgaggctcatggtgaagcagggatcggactgattattaaagaaatgtcatttggtgttgcaacgaattatttctttttaatgcccatcaaagccaaaaagattgttttaacacgtgtgtttaaagaaaagataactctccgtcaatttgaagaatggctaaatgaaattagatattttcaaagacgagctgcccataacttctcgctgttgattatcaaggaaaaacggcaatttctgtataaattagtactgaataatttgcaccagctggcaaatcaagaaccatgtgaattagctgaggaaagaatcaacaagattgttcaagattatttgacgaagtatccaattgaaaaagattttttgaataaagtttttatggagaaaaaggattaagttgaagttttttataatgatctttcttcaaacaaatgaccataggaacttaaaattctagctaaatcgatccaagtaagactaattgttttggtattatcattgggatgcacaccaactaaattgttttcttccattgctgcttgatcgacaatcaggggaattttattactttgatcattgagcaggctaaatggggaaacagcccctgttttaacttgcagtttttcttctagttcagcttcagtagcgaaggttaaactagaggagagtaattcagctttagctttttgccaatcgatttttttatcttcgggtaacattagtagataataatttttggcgttacgggttttaataaaaagagttttacatttagcaaaatcttcatcttctaagtatttatctgcctttttagttgtaaaaactgctggatgagagaatacttgatagttaatatcatgatcatctaaaagttgtaatatttcttgagtatgcatattttcctcctaataaaaaagtcaggattttcctcctgactgataactatttacgcttttgcttacctttattacggttacgtaagtcttggtgtagttctttcttagcttcagttgtagccttgctttgaccgctattggagttaaacaaagcatccactttttctttagtaacaacagtttcaattggcttatcttttaattcatcggcaatatgcttcttaacactaggtgtaaggacaaaggtaacgattacttgttggacaatcattactaagttaccagcagcccagtaaagagctaaggcaccagagaaggataaactgaagaacaaagtcataattgggttaacaatcatcattgattgcatggtcttcttttgttcttctggaataccaattagtgagatataaccttgaataacggtaaagacagtcgcaataatggctaaaacaacagatttggaacttagagaaataccaaagaatttggattgtgccaattgaggtgaatagaataccgcttgataaattccccacataattggtaactgaataattaatggcaagcagcccattccaccagttaatgaaacttggtttttagagtaaagctctctttgccaagttgataaagtcatttgttggtcaggggtgatccccttgtgtctcattgcattttgaatcaacttcatttgcggttgcagacgagccattttttcctgttgacgtacactcttgttttgctgtactaacatcaatggcatcaagattacacgtacaactaccgtaataatcacgattccccaaccagcaccattatcgccgccaatcatgtgcgcggtttgaatcatgatattttgtaaaggtcggcctaaccattggtaaacccaaccgtaaataccgctgtgcggtgcaacatgtggatcagttgttgccccacaggcacttaatacaagagtagctactgctaataaagccagtactccagcgtatcttttaatttttttcatttaaataaatcaccacttaatttctatctaaaaatgtatgtctctaatataatacatgaaaatcatgcattttttctacacctggaaccgattcttgactaatattttgaatttgggcaaatccagatgcagtaggtagtttttcaataaagcggtcgattttatcactgtctgcttgtaaatagattgtaacggtaccatctgcattatttttaacagtgccaggaatacccatcttgttagctaatgccatggttgaccaacgaaagccaacgccttgaactaagcctgaacaaattaattttcttgtttccatttttatctcccttatttaaattaagttcaactttgattttagcatgatcaaaatagattatcagttataatagattttgaatacaaaaaggagaaaaatatgcaacaaattagttcagttaataatgcaacgattaagaaattagcgaagttaaagcaaaagaaataccgcgatgatgaaggcttatatttaattgaaggctttcacttatttgaagaagcacttaaagctggtaaaaaatatcagtatatcttaggtactgaagaagcacttgatcaagcagatagtgaatatgaagttgatttaagtgggaagaatgtcgtattaattaacaaagcgattgctcgccacttaagttcgactaagaattctcaagaaatttttatggtattaaaaattgatcaaccaaaagaatttccgtttaattatggcaagtgggtgctgcttgataacttggctgatcctggtaatgtggggacgattatcagaactgctgatgctgctggttttgatggggtagttctttcaccagagagtgctgacctgtataatcctaaaacgcaacgtgccatgcaaggaagtcaattccatatcgatttgattaagcgtgatctagctaatgtgatcaccgattttcaggatgcagctattccggtttatgcatcgctgcttgatcgttctgctaagcaattgcctgatttcgaaaaagtgccacaacttgccttaattattgggaacgaggcgcatggcataagcaaaaccattgcttctttggctgatgaaaagctctatattccaattaaaggacaagctgaatcactcaatgccgctgtcgcagccgggattatgatttatcgcttcgcttagcacttgtaattagtaagcggatttactataataatgttagtaatactgaaaaatattttatataatattatttttacagggattatataattatggagggacttacgatgcaagaagttaaagaaaaaaaggatgcagctccttgtaaaccagaagattatgaattgtgctgtcactttgttggtgcttttaagattattggcaaaaagtggaatggtttaattattagttcactttgtgatacccaagatatgcgttttaaagatttagcacgaacgattgaggcatgtagtgatcgagtactcgttgaacgtttgaaggaactagaaaaagaagatatcgtcaagcgtagtgttgatcaaaataccggcatcatttcatatggtttaactaaaaaaggtgctgaacttaagccagtttttgaccaagtacataattgggctgacaaatgggcttagggtattgacattaagtaagaaaaaaagtatattacttaatgtaagttgcttatttaaaataagacaagatgaaaggagtacgaaaatggaatttttaagtataagaaatgttaatactgactgttgttcttgtgtatctaacattgcttttaatactcaagaattcagtttgcgtatgcctaaatagctttaattagaaaataaggagatttacgtcaactgaagtagcgtagatctttttttattgtttaaagagacctatgagagtgggtctcttttttgtgtgattgggggatttttaatgaattggacaattatccaacaagccttgcctgtgtttgctcggggatttgagctaacgttatggctttcactagttggcattgtgggctcaattattgtggggattattgtcagtctggtgcaatactttaaggtgcctgtattaagccaaattttgacagtatatgttgaattagctagaaatacaccgcttttaattcaacttttctttttatattatgcctttccagtaattggcttaaaaatgtccgctgaggtctgcagcatcattggcttaatctttttaggtggagcatatatggctgaaggctttaccggtggttttaatggcgtaagccctagtcagattaatagcggtaaagcattaggaatgaacaacttacaattagctcgctatgtggtttttccacaaggatttagcctaagcatgccggctttaaccgccaatattatttttttaattaaggaaacttcgattttttcagtaattgcaattccggagttaactaatacagcccttgacttgattgggatgtattaccattcaaatgaatatttattgatgctggtaattgcttatgcgattattttgattccaattattttattattaacttggcttgagaggagagtacggtatgcttcattcggggattaatgttttgtttgaaggaagtaactttgcccgtttgatggcagggctatggacctcgatttggattgcagctttgtcactagtaattggcttggctgtaggaacaatttttggtattttgagaaccttaaaaaatcgtccattgcgttttgttttgcggttgtacttagaattcttcagaattgtgccaaccgtagttttactgtatttggtttattatattttgccaagaagcttgcacgtcaattggccagctacttggatggcggtattagctttctcaatgtgggtagctgctgagtttagcgatattgttcgtggtgcattggaatcagtacccaaaacgcagcgtgaatctggcctagcactgggtctaaatcgcctgcaactgttccgttatgtcttgttgcctcaagcagttaagttagaactaccagcaacaatcaacttggctactagagtaattaagaccacttctttattaatgattatcaatatcatggaagtaatcaatgtcggtcaacaaatcattgaagcaaataatcaacaatatccagctggtgtgttttgggtatatggctttatctttatcttgtattttattttggattatcccttgtctgcatgggcaaaacgattaactgctaagaattaggtgaatgaaatgacagaagaagttttaagagtagagcatttaaataaattttatggcaagcatcaaactttgtttgatatcaactttagcttaaataaaggcgaggtattgaccttattgggaccttctggttcaggaaaaagtactttgctgagaacggtgaatgggcttgaagaatatgagggtggcgcaatttattttcacggtaaaaaaataaatcctagtccgaaggaatggcaattgttgcgccaaaagattgggatggtctttcaaagttatgacttatttcccaacttatccgtgatggaaaatattttattggcaccggtaaaagttcaaaaacgtgatgaagctgaagttaaacaagaagcagttaagttattagagcaagtcggtttagctaattatgcaaaagtatatccgcgtgaattatcagctggacaaaagcaaagaattgcgattgtgcgtgctttgattatgcatcccgaagtaatgctctttgatgagattactgcttcgcttgaccctgaaatggttcgcggcgtgctagatatcatgcaaagattatctgataacgaacatatgacgatgatcattgttacgcatgagatgaacttcgctgcgagaattgccgataaggtgctatttttagaagacggaaaaattttggaagaaacaccaggcaaagaattctttactaaacctcagactaagcgggcacaagaatttttagagagtatggatttttaggtgtgaatgatggcaaaaaagatttttaattggatcatggctgtcctctttgcggtagttgtggtaattgctggttattttggaattacgcgaccaggaattaacggcactgcttcaggcgacagatggaataatgaaaataatgtatcttcaattaaacgtcgtggctatttaagagtggctgtctttggcgatctaccgccttatggctgggttaattcacaaggtaagcgtgttggctatgacgtgcgcctagctcgcagagtggcgaaagatttgggcgtaaaacctaagtttattcaagttaatgccaataattgaattgataccttgaattctaataaggctgatattgttttggctaacttcactttgacaccagagcgtaaaagcgtggctagttggactaagccttatatgaaagtatcggttggggtgatttcccctaagtcagctccgataactagtccaaaacaattgaagggaaaaagcgtgatcgttactaaagggacgacagcagagaactattttactaaacaaaaaggcgtaaacttgcttaagtttgactctaaaactcagcagtttaacgcgattaaaaatggccgtggtgcagcttgggccgatgataattcttatctgtatgcttgggttaagcgaaatcctaagtttactgtcggcattaagacgattggacctaaccagtatatttctggtgcggtaaagaagggcaataagtccttacaaaaatggatggatcgtgaaattaccaaattgaatcgcgaaagcttttttacttacgattataataaagaattgaagccatactttggtaaggaaattaggagactgtcaagaagtttgtgtaaataatctctctcgttgattgacttttttatttatcttttaatcaaaataggattctagggtgtctcgaacttgcccaaatcctttatgaatcctgttaaagtaacggtcattgtaatccattgcctgaactccaataaaggtgtcaagcgactgctcagttggaaattctgttttaggcttggttttccgcttaagcctgttgttaaaggattcaatcatgttagttgagtaaattgaagctctaatagctggcggatagttgtaaaaggttaacagatcaggctcaacctgtctaagatctctaactacgtttttgtaggctttttcccagttttgatagaattcatgcagcacctgtacagccatttctttgtttgactgagtatgaatctgcttgaattcatccagtgcttttttcgatcgtcaacccgcattttggcactgatattacgcatgacgtgtaccaagcagcgttgaaaatgcgctttaggataggactggcagatagcctctttcatgccaactactccgtcagacaagaagagctctacctgttcaaggccgcgactcttgaagcctttgatcattccgttattaatattgcatgattttccaatagctttggttttattcatgatctttttaattggaacagttgacttaatgtcttggactggataccagattctaatttcggagtctgtttctgaaagtgagttatcaaagatttctggagcagttggcctgattagttcaattcaaaaaacatttggaccaggtatagcagctattattgttaacctctttaactatctcggtggcttcatgctagattcgatcagttttggctatttgacttatgttgttaaaggtattgagactacaaataacgagaacaatgataaaaaaaagaagagtatacagcaaaccttatcacaaggtttaaaatttgttttgaaagaacatgatatcaaatggttaattattagttttcttgctgccaatgttggctttcaagtagtaataccgatgttaactttcttattaaaagtacaaacacgtgcttcaataaatgaaattagtatattttttactatctcatcagttgctagtatactgggtaactttgtttatctacactttagtaaaaaaataaagctaggcactcaattaatagttattggattaattattactgtaggattcactattatgctggccattaaatctttattaatatttaccatgggatatgcaatagtatcatttggtagtgtatgggctcaagctaatttctttaccattattcaatctaagacacctgaccaatataaaggcatggtaactgctacttcaacgtctctgacaagaattacaggtccattaatggcaacgctaagtggtatactagtaagaatatctccttccttaatctttttcgtagctattgtatgcttagttttatctgtattaataactctgattagtggtttacagcaattagataagctagccaattaaaacgaaatcataatccatatacagattacttatgtaaccgtaaattctgatcttataggtggaacataagctaaagaaaagaagattatgagatggaatagctactagaatgttgtgttgttttataaatttaaaaataagtgcagtcttctttatatctatttgtgagagatctttataaataaaaaacaaattattttttatgaaatatttatcttcctaaaattcaaaaaatatgagatataaacagtatctttacaaaaagcttgcaagaaacaggtaaaagaaatatcatattaattaattactgagatcaagactagtagcagatattttttctgaacagagagtcttctttcaaaagctgcaagagaagatagaaagaacgctgtgaatttcatcttgggagtaggatctaatcaattccggtatttcaccgttaacgaaaacttaagtgtgggcgttgctacgtccaaactagggtggtaccgcgatgcttcgtccctattggggacggggcttttttgttttgaaaggaaagatttaatggacttatttgataagttaaaagagctccatgaagaagggcttaagcaaatcaacaaggctaaagacgaaaaaactttgaatgatgtcagagttgaacttgttggtcgtaagggcgaattaactaagattttgcactcaatgcgtgaagttgcgccagaaaatagacgtgaagttggtcaaaaggttaacgaattacgtgacttgtttaatgctcaattagatgaagctaaagaaaacattgttcatgcaatgttagttaagaagcttgaagatgaaaagattgatgttactttgccaggtcgtgaagcacatcttggttcaaagcacccaatcaacattattttagatgatcttgaaagctactttattggtatgggctatcaagtagttcaaggtccagaaattgaaactgatcactactgctttgaaatgatgaatatccctaaggatcacccagctcgtgacatgcaagctactttctacattgatgatgaagatttgcttagaagtcagacctcaggtgatcaagctagagtcctagaaaagcacgacttctcaaagggtccacttaagatggtgggaccaggtaaggtataccgccgtgatgacgatgatgcgactcactcacaccaattcatgcaaatggaaggtttggttattgacaagaacgtaactatgagtgatttaaagggtactttggaattaattgccaagcacgtttttggccaagatcgcgaaacccgtcttcgtccaagttacttcccattcactgaaccatcagttgaaatggatgtatcttgctttaactgtaatggtaaaggctgccctatttgtaagtacactggctggattgaagtattaggtgctggtatggttcaccctaatgttttggaaaatgcaggtgttgactcaagcgtttacggcggttttgccttcggtgttggtcttgatcgtttcgctattttgaaatacggtatcgatgatattcgtgacttctacaccaatgacgtacgtttcttagaacaattccgtaaggaggaaagataattaatgttagtttcatacaattggctaaaatattttcttgatttagatggtcaaaatccatacgaattagcagaagaaattactcgtagcggggttgaaattcctgaccgtattcatccaatggatggcttgaagaagttagttgtcggccgtgtccttgattgtgaaggcgttgaaggtactcacttgcacttaactcacgttgatgttggtgaaaacgaacctttgcaaattgtctgtggtgcacctaatgtagctgcaggtgaagatgtgattgttgctcttcatggcgctcgtattgctggcaatgaaaagattaagaagggcaaaatccgtggcatggaaagttacggcatgatctgtggtttacaagaaatcggctttagcgatagcgtggtaccacaagaatttgtcgatggtatttacgtattcccagcagatgccgaagttaaacctggtcaagatgtatatgaagcacttggcatggatgattacattttgaacttcgacattactcctaaccgtgctgatactttaggcatggaaggtgccgcttatgaagtcggtgctattatcgaccaaaagccaaaggttgaagaaaaggttgtcttaaaagaagatggtccagcctggacagattcactcgatgttaaagttgatgaaaagcttacacctaagttttacttacgtaagctcgagaatattaagattcaagactcaccactttggttgcaacgtcgtctttggaatgcaggcattcgtccaattaacaatgtagttgacgttactaactatatcatgctgttaactggtcaaccaatgcatgcttatgacgctaagacttttgctaacggaaagtttgaagtaagacttgctaataagggtgagaagcttactttgcttaatgaaaaagaagttgaccttgaccctaaagatatcatcattaccgatggtaaaaagccagtaatgatggctggtgtcatgggtggacttgattcagaaatcacttcagaaactacagatgtcattcttgaatcagccatctttgatccaactttagtcagaaaggcagcacttcgtcacgctaaccggaccgaagcttcaagtcgctatgaaaaaggcgttaactgggatgccactgaaaaggcaattaacatggcagcgcttttacttagaaatgacgctgacgctactgttgatgaaggtattcttaaggcaactgaccaaaagcgtgaaccagttgtggttaaaactactgcttcatacctcaataaagtattgggcactaagttatcagttgatgaaattgtaaagatttttgaccgtctttgctttaaggtagatgttgatggtgataatttagctgtccatgtaccaaatagaagatgggatatttcaatcccagccgacttagttgaagaagtaggccggctttatggctatgacaaccttgaatctactcaacctgttttgccagaaactcatggtggctactcagaaaaagaagaaatgatgcgccgcatgaaggcaattgttgaaggacaaggcttgatggaagctatttcttactccttgacttcacctgaaaaggccgttcgttacactaaggatccaaaagaattagttgaagttaaatcaccacttaactcaagccgttctgcaatgcgtgagaatttgatgactggattggtagatgctgctagttacaactttgctagaaagcaaacacaattagctttatttgaacaaggcagaacttatgaccatgatggtggtaaattcaacgagcatgaacatttagcagctatttactctggcaatacttttgcggaaaattggcaacatttaacccaaaaggtagacttctactttgttaagggacagttaaccaatttgttcaatgcaattggtattgatcctgaaaaagtggtttatgaggctaaaggcattaaggggatgcacccaactagaactgcaggaatctacattgataagcaatatgttgggatgatcggaatgattgctcacgctgtaacgattgctgataaggcacttcgtggtagcgagctttatggctacgaaattgatctcgatacaattattccaatgttaactaagggcgtaactgcagtgcctgcacctaagttcccagcaattcaacgtgacctttcacttttagttgataagccagttactaaccaagaaattgaaaacgtcattaaatctaatgctggtaagtacttaactgaacttaaggtaatcgatgtttatgctggtgctcacattgatgttggtaagaagagtattgcttacaacttaaccttcttgaacagaaaagatactttaaccgacgatgttgtcaataacgcgatggacaagattgttgctgctcttgaaaatgatcttgcgattaaagttcgttaaaggttgacattattgacgtaaattaatattattgatcagtgcaagataaagaaaattaatttctgaggagttaaaaatatgcctgaaaaatcttatccaatgactgctgaaggtaaagaaaaacttcaagcagaattaaagaacttaaaattagttaagcgtccagaagttattgaacgtatcaaggttgcacgttctttcggtgacttgtcagaaaactccgaatacgatgcagctaaggatgaacaaagtcaccttgaggatagaattgctcaagttgaagaaatgcttaagtatgcacaagttgttgatgcagaaagcgttgatcctaacgtagtttcagttggtaaaacaattacctatactgaagttggtactgatgatccagaaacttacactattgtaggtagtgatgaatcagatccattgaatggcaagatttctaacgattcaccaattgctcaagctttattgggcaaaaagaagggtgaaaccgtatcaattaccactcctggtggcaagtttgacgttgtaattaacgaagttaaagcctaataataaaaagggagggtagctatgactatcttcctttttgtttttttgaaaggattttaaaatgagaacagttggtattattggcatgggccatgttggtgcaaccgttgcctatactttatttacgcacagtatggttgacgaactgattttaattgataaaaatgaagctaaagtaaatgctgaatacaatgacttgcatgatactttggctagaaatgatagctatgttaatgtgcgaaagcaagattgggacggcttagaagatgctgacattattattaccgcttttggtgatattgcggcttcagttaagacaggcgaccgctttggtgagtttgaattaaatgcaagaaatgccaaagaagttggggcagatattaaagaatcaggctttcacggcgttttgatcaatatttctaatccatgtgatgcaattacccaaattttgcaagaaacttctggtttaaagaagaatcgcgtctttggtactggtactttccttgatactgcaagagttcaaagaataattggtgaaaaacttggtcaagatccacgtaacgtagaaggtttcgttttaggtgaacatggttcttcacaatttacagcctggtcaacggtaagagttaacaacaagattgctttccaattgtttggtgatgaagaacaagaaaagattagtgaacaatcaaataagaattcctttattgtggctaagggaaagggctatactagctatgctattgccacttgtgctactcgtttagttcaagcagtctttagcgatgctcatctatattgtcctgtttcagtttataatcctgaatacaagacttatattggttatccagctattattggtcgcgacggcattgaggaagaaattgaattaaagcttacttctgaagaaaaagaaaagttgcaagctgctgcagataagatcaaagaacacttgaagcaattgaagaaataaaaaatagtcattataaaaaaataaggcgagaattacagtcattgtagttctcgtcttatttattgcttattttagttttacatcccaagcggcaatttgcttgttgccgtagtatttcttgtaaatttgcttggtctttttggtctggtatgctttaacaatttcttgataaatctttttatttttatccttagtgcgggcgcaaataatattgatccattgctcagagtctttgttcaatggttcgacaaagatagtttgcttgtcacctagatgtgcagggccagcaaagtcattgttgacgacagcggcatcaacatcatcgatcacgcggctagtttgttcagatgcaacttctttaattttgaagtggttaggattggcagtaatatctgcaacagagaccaatactttgcctttcttcaatttgatcaacccggcatttttcaaaacaaaaagtgctctcgattcattggtgggatcgctggggaccacaattgttgctccttcaggtagtgcatttaggctatgatattttttggaatataagcgaataggtgagatataggttttaccgattgcagtaattccgccatggttggctttgttccaggcgttgaggaaagcatagtgctggaaggcattcagatcaacgtcaccggatttaagtgccttgtcaggttggtcataaccatcaaaacttttagtggttaaaataatcccatatttctgtttgacggtttgagcaacgcttttccagattgcaatgtcacctttgctggcaccaacgattcctacgctaactttggtttgaccgttgctttttggcgtccaaaagaagctgaagtaaccagctacgataatcaataagctaacaatggtgccaataataatattccgctgtcttctttttctcatttttctttctctcatatgcaaaaaaagcacccatcctcaaaggacgagtgcttcgtgttaccacctttatttgccagctatttacataactgacctcaatagctatctaacaatagcttgcattgttaacgagagcaaccccgatactagctaaatatcactagtataatcattctgaatccatcttcattaagcagtttcttttacttctcaccaaccagtaattctctgtaagaaagctagctataattactctattcatcaagattttttaattattgctattaatttatcatctcgttttaattttgtcaaataaatttttttacttagttaaaaagttagtaacggaagaaatagtgagaaaaagtttatttttgtcgattaacaaagtagtaaatgagtgagacaaccgattcagccaacatcccaccggccatccagtacattgccatcatcattttgccggtaaaagtaaagtaggcagtaatggcgtaaacaattacccaaataattttccaaaataagttattcattcctgagcacattttgaagctcctttatttttgactagcaccagaactgctgtcaacttccatgccgcaaccttcggtatccattcctggcatccacacatcttcaggtttaatgcctctttctttagcaaaggcgtcggttaatgtcttcatatccattaacttgtatgtctttgggtgtttagggtcgaatacttcgatttgagccatcattccggcatcttcgtgttcaataatgtggcagtggtacatgaagactccagtttgtgggaattctacacgcaagcggacggtttcacctggtctgacaggaatggtgtctttgtaaccatattcatttggaaatggcttttcgccatcacgtgaaacgactgtaaagtgtgtgccgtgaatatggaatgggtgcaacataccgtgttccttagagttggtattagttacgtcccagtattcagcatgactaacttgttgcttcatatcgatccgctgcattgcgaattgcttgccgtttatcttgttgtgatcatccatagttactttacgaatcggcaaatcttcagcgatttcaggaatttctggtttgaataatgtatcaggaataacactgttgtcaggtgcaaacttgtgaattctaaattcaattagtttgaaatcatcagtataaaggttaacgacatcgccatcatggtaatccttgaagtcaactacaacttgaagccgttcaccaggtgttaccaagatcttagtcattttgattggatgaggcaaaaatgaatcgtcacctgcaatttgagtcataactaggtcatcatcaaagtgcaagcgccattcacgacggttagacccacctaagaatagtaaacgaatcttttgtgttgttacatcaacataagggcgaaccgtgccgttgattaatggtgtttcaccgaagacgcccattgcatcataatcagcgcgatagtcaagttgattatctttgtggaaagtacggtcttgcaaaataactggaaactcgtcaacgccatagtttttaggaattgggagtttagcttcgttttcatctgttactactacgcccatagctaatcccatccaaacttgggcagcggtggatggacatgggtgagcatgaagccatgttaaggcagctggttgattaacagtgaattcgatttgcttttcttcacctggataaacaggggcatgacagccaccatcagtaataggaccaggaacttccatgccatgccagtgataagttgttagttctggtaaactattttttaaggtaacgtgaactcgctggccacgttttaagaccatggttttacctaacaaaggagcgttataaccccaagtcttggtcttagctccaggcaatatttggctttcgctttcaattgattcaagagtgaaccagacatcagtatcagtttccttatccagtgcaagaactggagggacagctaatggctgagcttctacaccttgagggatgcttaatttcttgtagtggaagtggtttttgtcaaaatcttcatctttgataaagtaattagtgtatatcttatctgtcatcttattaaccccattcttttgacactaacttagcatgattttttaccgtcttcaaggcgcaagaacgctgttatttaaaggcttgcatgtctattataactatgtaatgaaaaatatttttactattttgtaatcacttatacttaggcggattatgttattttacaagatttgttgccttgctaggcttgcgtgtctccggtaaactaagcatgaagaggtgactagatgtataaaattattgcgtgtgacttagatgaaacgttgttgagcgcagatacgcatgtctcagtagaaaatagagaagcgattcaaaaagcagttgctcacggtgtaaaatttgttcctgcaactggacgaggctacgtttctgtccaaaatactttaaaggaaataggattagagcaggcagctaatgaatatgtgatttcattcaatggtgccagcattacagaaaataagaataatcgcgtgctgtattttgacggcttgcctaatgaaattgcggatcggttatatcggcatggggttgaactagatattgccatgcatgtttacactcaagatatggtatatacgtatcatatcgatgatgatgaacgtgcctatatgacgggacgacaccagtttaaagagattgaagataaagacttgtcatttttggaggggcagaaaattgccaaggtgctctatgagagtcttgataataattatttgcaccggatcgccgctgaattaggaccaattacgcaagaattggatatttcgtattcgtctaatcgctatttggaatttaaccgtaaaggtgtcaataaaggcgcgggactgatgaagctggctgagcaacttagggtgccgattgaagaaacaattgccattggtgataattttaatgacctgtcaatgattcaggctgctggtgtgggtgttggtgtagctaatgtcaatcctgctatgaaagagcaatgcgattacattactcaggctgataataatcatggtgcagttgccgaggcaattgatcattttatttttaacaattgaaaaaaataaaaaaataattgacatattaaaaatacatgatattattgtttacaataaataaaaaaatgagctttgataaggaaagtaacttaagaaatgatttgcagagagtcttcggttggtggaagaagataatgatgaattaagtgaaaatcacctttgagctgaaagtgcgatattagcattttcagggtccgccctctatagcggcgacgtatcgctgattttgatagaatcagccgcacgtgcatgaggtagaatttttgtgagtattattctacgaataaataggtggtaccgcgttgaagacgccctattagatcaattgatctagtagggcgtttttttattatcataagcttgttgttaattttttgacttatgggagagataaaaatgagaaaaacattgaagcacttatttggcacgactgtagtagcacttttaggtgtaagtactttatctgcatgttcatcaagcaaatctggtgctaaagcacctaaacaagaattgacctggatgactacctcagaaatccaaactatggatccttcaaagatggtagatacaactggtagtgaacaggcatctaatgtttttgaagggctcaatagactgaataaagcgggtaaagttgtatctggtgtggctactaaaactaatcagagtaaagatggtttgacctggacttttactttaagaaagaatgctaagtggtctaatggtgatccagtgaccgctgaagattttgtttattctttaagacggacacttgatcctaagacacaatcacaacagcaaaatgagtggtcaaatgtagttaatgcagatgatgttttagctgggaaaaaagctccgtcgactttaggtgttgaagctaagggtaaatatgaattggtagttcacttgaaacatcccgtaccgtattttaaagccttgtcagttggttggaatccgcaaaataaacacgtagtcgaaaagtttggcaaaaaatatggaactgcatctaagtatatggtttacaatggtccgtttgttcaaaaaggctggactggttcaagtcttaactggaagttagaaaagaatgatcaatattgggacaaagataaagttaaattgcagacggttaattatagtgtacaaaagacgccttcaactgattacaatctgtatcaggctaacaaattagatggtgcctatcttgatgttcaggcttcaaagagactgaagggtcaatctggttatacagtctataaactagatagaactgaatacttgactttcaatgtatccaagcatccagaactagctaatgtcgattttagaagagcagtttcaatggcacttaaccgagctcaattggctaaaacagttggtggtgctaataccgtagctcgaacttttgctggaccaaatgaatatgttgatggtaagaattttgaccagtatgttgaaagcaaaaatccagctaataagtatatgaattataaccctgcaggcgctaagaaactttatgatagagcattaaaagaattgggtaagaataagttggcctttaccttaatgggtgacgatgatgacgtttctaaaaaggttttagagtttgtgcaaagccagttagaagatacctttggcaaaaaagttgatgtaactgttagaagcatgccgaagactactagagttaagaaaatgctcaatggtgatttcgaggcagtctttactggattgacttcgggctatttagatcctaattcacaattgcacacaatgatgacaggacaaagttataacttcggtaaatggtctaacaaagattttgacaagtatatgaataattcagataaggaattaaatcctactaagcgattagaagatttgtataatgcagaacgtgttttaactgatcaacaaggattgacgccattattccatgatggtcaagcttggatggttcgaccaagtgttaaaaatgtagaattcttgggtggtaatttcagctttaaggatgcatctgtaagtaataattaggagaaaaataatgactaaaacagcttttgtaaattgtaatttattcgttggtaatgaagataatctagtagataatgcttggtttgtcgttgatgatgaaacaggtaaattgaccgatcaaggtaagggaaaatgcacagcagattttgacaaacaagttgaccttaaagggaaatatgtgatgagcggtttgattaattcacatactcacatggggcttgattctgacttgaagaaaaaatttccgactactgaagcttcgactacttatgcagcactgcgggatctgcgtgaagctttacaaactggtgtgacttatgttcgtagttgtggcacatcctttgatgttgactgtaaattagtgcagatgcgcaagcagtatccttttgaaggtcctcaagtgatgccaactggaatggcaatgtcaattgtcggcggacatggtgatttcaaggtggggttaaatggagagcaaaatgctagtcatttggttaacggtccagaggacatgcgtcgggcagtgcgtgaacagtttgccaagggtgctaaaaatgttaagctgatggcaactggtggaattatgtcattaggtgatgaagttgatgatactgaactttctcttgaagaaatgaagatggcagtagaagaagctcattctaagcatatgacggtttgtgcccatgctgaggggagacgcggtattcattatgcggttgttgcaggagttgattcggtagaacatggtttttatttagatgataatgacttggctttgatgaaaaaacaaggtacatttttgtcaccaacattgactgcaggtcggacaatcgtcgttcatggaaaagatgttgtacctgagttctcataccgcaagatgtgtgcagtagttgatgacttttataatcatgttggacatgcaattaaggaaggggtgaaattggcaatgggtaccgatgcaggaacatacttcaatcgcttttctgatacaccaaatgagttggtggaattagttagagcaggagccacaaattatcaagctttaagagcaggcggcttgggtagtgctgaattgcttaaggttgatcaagaatatggttcacttgaagtgggaaaatatgcggatttcttagttttacgagagaatccattagaaaatgttgctgcagttggtcaaaaagataaacaagtttaccaacatggtttacgtaaattctaaatattttttatcacaaataaagcatcctcgtgagatttttcttgcggggatgcttgtttgtgtagttcaaattaaagtaaacattttactaaattctccagtaaaagcgaataaacataacccaaaatataaaaatagttcttgatttagtatgaattacgatgtagtatttaagccatcaaacgtattactgatgatttgaataagtggagattgaaatgtcaagttttcaagaatactactcagaattacaggaactagcagggtatttactacacaatccagaattaggctataaggagtataaaacttctaaggcagtggaagcagaaattgctaagatttctactaatataaaaatcgaacattattgtaaaacaggacttaaggtaatgtttgataatcattgcccaaaaactattgggattattgcagaattggattcactttatcagccaggtcataaggatgctgaccctgaaacaggagcggcgcaagcttgtggtcactatactcaggtgacaacagcctgggctttgataaatgaactgatgaaaaatgatcgtctcaacgagtttggcactaatttggcttttatttttactccagccgaagaatttgtagatcttaattggcgcaaaaagcataagttagctggtgattttacttactttggaggtaagcaggaagccatcaaacttggcgtatttgacgatattgattattgtgtatcagttcatgctataggtgaagattttgagcgtaggactattgaaattaattgtgatttagctggatttaattttcaatactttgacttctttggtaaggcgagtcatgcagcatttgctcctgaagagggggtaaatgcacagagtatagccaccctatttaccactgctttggccttcaaacgtcaacaattaaaaaatccaaatcaaattaggtttaatccagtgatgataggtgataatacagaatcgattaatgtaattcccgatcatgttagcatggggacagatatacgatactttgatgtcgaatatgcacagcaactaatgaagcaattcaatcaagcagcagaaggatgctccctagctttaggcggtaattttaagtcagaaacacaggttggctatttgactttaaggtcgaatagagacatgaatgctttagtaaaaaatgtatttttaaggaatgacaagatttcagaattgattgaaaaccgaggctataccatggcagctggtgatattggtgatgtaagttatctaatgccaactattcagattggatatggtggttggaatggaaccattcatggctctgattttaaattagttgatccagtttttgtactggacatattcccggaatttatctttaacagtgttttagaaatatcaaataatcttaataaaatcaggacttatcgtagaacaaatcaggaatatcttgaacaattaaataaaatgggagcagaaaaatgaaatctttaaaaaattatggtccattaattattttagtgctattgattgacactattgcggaatttatagggatgcaggttttcaaaattggtaaaattgaagtttcaattctaccattagtattcgcagttattttagcgattattatttatttacttccattaaagccgattaagcaactctacaatgataaaagagtaaagtttgctggaaaatatatgattttaataatgttgccactaatggcacgttatggagcaaatgttgcacctaagattaatgaaattttatcagtaggttgggtatttctcattcatgagttaggtaatttaggtacaattttatttggactaccagtagctttattactaggattaagacaagaggccattggctcaacattgggattaggcagagaaggagaactagcctatattagtgaaaaatatacacttgattcaccgaaaggtcgaggagtcctaggtatttacttaattggaacaatttttggttcgattgtcttctcaattttagcaccagttcttttggggatgggctttagttatcaagctgttgcgatgagttctggagtaggatcaagttctatgatgactgcagcttcttcagctttagcagctctggttcctaaacatagtgagacgattctatcatttgcggcagcaagtcagttgttaactagttttattggaacttatattatgtatttcctcgcagttcctttgcaaagattcatgtatgttcacttgactagtttgcttgataaaaagaaagaagtatacccagaacatgattagagaaaataatttttataaattaggtagagatgcattaattttattgcttagtgttagtttagttttatttgttcagtagattaagttagtaaaaaatcctaagagcaccccaattacacctgatacttttgccggcctaggtctattatggctgttttctctgattggcattattatcagtatgttaatgaaacgagttccgtggaagattgttagaggatttcccattctaggctgggtgtctatcgtttcattagttttctgtttgcttagtccatattgtgttcgtgtaattaatgcagtagattttttatcattaactacatcggtattagcctttgccggaatttcagtaactcatagattgaaggatttatcaaagatttcatggaagatcttaattgtggcattatttgtctttttcggtatgtatttcatggatactttgatttctcaaatagctcttaatttgagtggaaaatagaaaaaatatataaagccacgctcaacagcgtggctttttgaagtgtgtcgggcatgacattcatctagtccaatgaaagcttggcgtaccgcaaggtggaccgctctcgccaatcctatccaatatctatttagataaaatggacaaggaattggaacaaagaggcttgcgctttgttcgctatgtcgatgactgcaatatcttcgtcaagagtggtaagtcggctaagcgcgtgatgaagtcaattacatcatggctagaaagaaaactgttcttaaaagttaacactactaaaactaaagtagttagaccaacgaagagcaatttcctaggctttaccttctggaaaacgggcgaaaactggcaagcaaagccgggagacgaccgtaaagccaagctttatgacaagattagagaattgttgagtcgccataaagcagttgctcaacctctatcattagtctttactaagataaatcaagtggtcaaaggctggggtgcaggcgtttttggctttaacgcaaaagaagtcgcaaaaatgtggcaggaggcctttgatactccgacaagcatctccactgtgatttacgctgttattcctggcagaaagaataaagacgtggtagctgattttaaggatatttttgcttaaatagaaattttctctcaaataacaatccaaacaaaaaagacgagccaatgcccgtctttttattttcttgaaataaatttttagttaaaagttagcttttttaacgtaagtgttcttagaaatacgatagaaagtcttgccgtgtaatttaattgcgcgaccataagtgttaacgcggtgacctttcttcaaaactttcttattagcacgcttgccgttcttcttgtagacataagcattgtgcttcagagtccgcttaacggccttagctttcttggcagctgtctttttagcagcagcggcatcagtttgagtcttgtcagatgtagtattggcatctttattagcagtgtcttcagcgaccttacctaaagtaatatcagccttttcgttcatggtcttgcccataacgttaagaccgaattctaagctgccagcgccttctttataagcatctgctgagaaaacatagtcaagggatgagccgtctttagcaacattttcttgcttgccggctacaccattcaatgttaggctagcaaccatcttagacatgtcttgacctttggtcattggtgctttagagccatcaacgtgaataattacttcggtaactttaccgtctttaacattaacttgagcagagttgcccaagaacatagcagcttctgatggggtagtgctgccagttttggtaatagtcatagtgatagtttgcaagtcgctgttttgactagtagcagtagttgcagcaacattagtagcaggttgatcagctgcagacactacagctgatggtgccaaaacactagcgcttgcgagtaaagcaagtgatgttaaaatgattttagtattttttctcataaaagtttcctcccacgaattttagatatcgcttacattataatcaaataaatgttataaatcaatatattttttgttattttatttttttatgagcataataaacgaaactgtcaaatcttttgtgtaaatagatctttctcgtaaattgattttttaattatttatttaatcaaagtaggattctaaggtgtcctgaacctgaccaaagcctttatgaattcgattgaaataacggtcattgtagctcattgcctgaatgccaataaaagcatcaagcgactgttcagttggaaactctgccttaggcttagctttgcgcttgatcacattgttaaatgattcaatcatgttagtcgaataaattgaagctctgatctgcttgggatagttataaaagaccagcagatctggttctatgtctttcaagcttctgataacatggctgtaaaccttgccccatttggtatagaagtcatgcaggacagctgtggcttcttctttgtttgtctgttgatgcacctgtttgaattcgttcatgatcttttcacgatcgtcgacgcgtactttagcgcagatattgcgcatgacatgaaccaaacagcgttgaaaatgagctttaggataagtcctggccaaggctgttttcatgccaacaacaccatcagaaagaaaaagctcaacttgctttaagcctcgggatttcatgttttgaagcatatctgtccagacttcaatgttctcgctaggtgcaatgcagtagtcaatgacctccttgtgcccattaggcttgatgccaatggcaatatagactgcttcacgctcaaatgtttctcggcgcaaaggaaggtatgtcgcatccaaatagacgcagaaaaacttgtcgcttagcttgcgtttgtggtaagcctcaacctttggaatcatctgcttggaaatatttgatacctgagctggactgtaatggctgccatacatcttttcaattagatcggctatttccctggtggtcacgcccttggagtaaagcttgataatcatgctttccaagatatccgagtgctgcttgtagtcaggcagcgtgtgctgatgaaattgaccgttgcgatcccggggcacttgcacttcaattgggccaaattgcgtatcaactttgcggaaataagcaccatttctagagttgccagtattccagccatttctggcatagggatcatagcccagaaaggcagtcaattcagcttctaacaagttattaacagcctgttgtagctctttgcgcaataaatcatttattttgtctggattgaatagagcttgagcaaaatctttggtaaaatcattcatgaaggagttcttctttctgtatgtgtttttttgttcaaaccaatcatacgagaaaggaactcctttttctaatgtttaaagaaataaatttaaggaatcattcatccttacacaaactattttacagtctctaaaatatcatcttgaaaccgattgcatagttattttaagaactttataatagaaaagactaatagtattaatagtaaaaagaaggatattagaatgaataaaaagttacttaagttaatcgcaagtagttcggtcgcaatgactttaatggcacctggagtggcatttatgcaaactaatccggttgtaatggccgctgaacaaagtcaaaagacagtgggaatgacggtttacaaatacagtaaaaatcaccgcagccatgctaagtcaatggctcaaggttttgtgggagataaggtgcaattaacagttagtcaaaagcatgtgactaagatgacaatccatgtcgatggtaaaaatagtccaatgggcaaggggcaaaacgtaaataagattgtaaaatccctcaagattaatggcgttagcggtaaaaaggaaaatgtttccgccgacaaatctagttttgactttgtttttgcaggaaaagctttcaaaaataatggttgggtcaagatgcaagtcactattgactttggtggtaagatgaccgaacaagcttgggtgaagtatgacaaggttagcggtttaactactagcaagaaaaagaccgacaagaagcaaaagaaggctagtaaaaagagcgtcaaaaaagttagtaagaaaagtacacacggtcagcgcagataaaaaggttcaaaatatcaattatgcggtctataaggcggatcgcagtggcgtttctgcagcaaataatttttacacgcatcatgccaggattgaaaaagtaaagcagggctatgttatgaccttaaaagttgaggtaaagcatgggatggtgaccaaatttcagccggtttcactgggaattggttcaatttcaaacctgcgttttaccaaacaagctggcaaggatatctggacttatcaggtccacttcaagtcgctaaatcagttaaagaagcaggctcaggggagtctgcgcttgagcgtaccaattgccaatattcatgatcgtttgtttaaggtctggtttgcttttggtgtaaaaaatgtggcgcacagttcgactgtaagcaaggcattaaccgaagcaaatagtagcactgattcaagtagtactagtgatgctattactgcagctaatgacgacagtagtaaagatgcaaaaaatgctacaagtagcgctcaaccgcagtcaaagccagttaaaaagcagcagtcttcttcaaactctagtgtaaaacctggggcaaagatgacacccaagaagaaaaagatggcgacgattgcagcggtggaatatccatttttgcctgtgatcgcaggctttttagcatttgatgctgcaattattggtttggccttttacttaagaaataaaattttgaagagaaagaaataatgaaaaatatagctaaaattatctcttttcctttcttgttgctaacttgtttgtttatttttggtgtgactgttagtgcacaaagcgtgagttatcgcacttacaagtatggcacgcatcagacctcgatggctgatggctactatgcgcgtcctgctcaggttgtggtagacgacaatcagtacctggtaacgatgacgattcgcactaagaaagatctaagtccctatccggttcaggtgttaacgattgatggacaagcaccgctaaacgtagtaaaaacgcggcatggcagtgactatgattatcgctatagttttcgcactaataatttaaaacgtgatatttctagtcaaattaaaatagatgtgccacatgtttaccaagcaacacacaatattacttttgcttttgacactacacagttgcctaagttaacaaataaaaaagagcgagcaagtcatgcggaaagtgcgataaaacgcagcgcgccacaggtgaaaaacaagagtgttaagcctaaggagcaattggcacaaaagaagcaagcggcaatagctaacaggcaaatagcgcagaatgcacgcaatcaacgtgctaatcaacaaaggcagcgaaatttttattatgttattttggctggagtgcttagttcgttaattttaattggcgttgctgttttgattgtcgtaaatgccaaggaaagaaaaagtaaatgaaaaaacgtaaaggattaattattggtttaattatatttttagtagcaatcgtcggagtggcaattggtgctaaacgattgattgatcaaaaagttgccaataatgaaaagattgttgccacaagtgcagcgattactgaaatttttgataaattgaacgttaatttagcaggggttccaaagacgcaggctaagttaccagcacgctatcaaaaggtgcccaagattgggagtccaatgaagccaagtgttgaaaagattgcttctttgaatcccactcgtgtctatgcagtctcaactttaaaagatcagtatgatcaatcatttaaagaacaaggcgttaaagttacatatttgaagctggattcagtagctgaccttgaagctacactgagttcattaggcaagcagtattaccggcagagacaggctgattatcagattggcttaatcaaaaaagccgttaaaaaggctaaagcacgtgttcacggtcgtaagcctagagtattgatcttgatgggcttgcctggcgctaattacatgattctaactaatcgatcatatttaggtgatttggtcagaatagctggtggggaaaatatctatcactctgatagtcagatttatttgtcaccaagtaatgactcgctagctactaaaaatccagatgtcattttgcgattagaacatgctttaccaaatgtaactttgccacaatttaagcaagagtttaagaaaaattctgtttggaagacgatgaaagccgtaaagacaggcagagtttatgacctacagcaaccagactttaatgcttcagctaacatgaatgtttctcaagcattgaataaattaagcaactggttgtaccctggaaagtgatcaaaatgaagaaaaaggtaatttggataaacttgattttagcagttttgttaatcagtacgattttctttgcattaactcacggagcaagcaatttttcaatgcaaaagatgactaacagccaattgaatattttgtttaatatccgtgtcccgcggattatttcggcactagtagcaggagctagcctctctgttagtggtgccttttttcaggcaactttgcgcaatccgattgcagaacctggaattatggggatctctagtgcagccagtttatgtcaattgctagcggttattattttgccagaaattttctttggtaaaattattttcgcgattattggcggactgctagcgtttgggcttcttttattattccaaaaaaagatgacgccttatcagttaattatcatcggagtggcattgaatgcagtgttcacggggatgcaggaagttttcactaatagtcaaaatagtggcagcagcctggccacaagtagttggggatcgacgatgtatttattgattattggcgtagtagggctgattttcgcgatttgttttatgaattgggctaattacttgaaggtcaatgatgaagagctgacgtctttaggtgtttctgctaaaaccctgcgtttagtcttgatgctaattgcagtggttttggccgcaacaacaacggcttgcattggtgttttagcttttatcggaattattgtgccacaggttgctcgtttgcttttgggatatgattatcaaaaaatcattccattttcgatttttgctggagcttggtttttattgttcgttgacaccatcggccgggtgattacagcaccgaatgagattgcggctaatattattttggctattgttggtggtccagttatgattttaattttatggaagaggcagaaaaatgcttaaagcgtcgcagattgatttttcatatgggtcaaaacaattatttaatcaattctctctgagcctgcaggagcaccagattacgactttaattggtcctaatggatctggcaagtcaaccttgtttcgcttgcttacacgggcaataaggccgtctgcggggacaattacgctagatgggcaagatatctggcagctagctgcgaaggattttgccaaaaaggtagcaattgtccaccagcagaatcaattgtatgatcagataactgtcaaggaactggttaaaatggggcgtctgccgtatcattccttgatgggggatgaagaaaatggatctgctcgccttcaacagattatgcaggagctagagattgctgatttggcagataagtttatagcgcaattatctggcggtcagcagcagcgtgtgtggcttgctacagcactggcgcaagagccggaatatctttttctagatgaaccaacaacatacttggatttgcattttcagtatcgctttttggatttagtgaaaaaattgaatcgaaagcagaatttgacgatttgcatgattttgcacgatttgaatcaggctttgcaatatagtaatcaggtaattttgctcaaccaaggcaggattcaaaagcagggcaggccagaagaggtaattacggcgcagacgattaggcaaaactttggcatagattgcgagatgatcgaaactgagcagggaaaagtcttgttaatggcaggttctgaggcaaaataaaagaccacgagaaaactcgcggtcttttttgtaataataaattattacttgttaacttcatccttgaagctcttacctggcttgaatgctggaacgtttgatgcagcaatttcaatttccttaccagtttgtgggttacgacccttacgagcagcacggtgacgaagttcgaaggcaccgaagccaactaattgtaccttgttgccttcagcaacattgctcttaacaacgtcgatgtaagcgtccaaaatagtgttaatgtctgtcttagtagcatcagtctttgcagcgatttgatctactaattgtttcttagaaatagtttccatgaaaaatacctcttttaatataaactacgattacttattttaacagtaatccgcgtatttacaaggggaaacagcctctttaaagaatttttttaaaaaggaaagaaattctatgtatttgaagcgaaaaatattgtattcgctatcaaaaatgtagttcatgtaatgattcttttgttttgatttgaaaaattaacttttttcaaaaaatttagacattttttgcgtaataaatgatgggagacaagcctaaattttgaattccaaattttgtacagtgatggaatatataagagaggtgaataatctttaattacacaaaccacatcctcgaaatatgcttaaacaatatcaattaagaacgttgaagaatggattaagaatggcaggtataagactatgagcctactaacttataaaggttaccaaggtacttatcgaagttgaaaatgatactttatttggcgaagtcttaggtctagaaaatacttttatttcttatgaaggaaattctctggcagagttgaagaaagatttcaaagcgggtattgatgattatcttgagaattgtcaattgaatcatgagcaaccagaacaggctaaccaagatgcagctaagttacagttgcaaaaattattattaacatcattagcgtgattggaacaaaataaagctcgaaacttctacaaattgtagtaacttcgagctctgcattaatctgtttttgttcaatacaacgcatgctattacatattggcaaatcgatctagttcatcatgtgttcctaatgcaaccaaaactaggattagttcatgtgtttctttatcaatccggtagtacaatagccaatcgtcattatattgacgattaacgtgcattttgcgattttttcctacagggtgatctttatgtttggctagaaattctttgtcattggttaatattgcttcaacacaatcatcaacataatccattggataatgttttctttcatatctcttgtaagcgcggtagtagcgcttggtaggattaacttgcatgattatttccgcatggcctttttgtattcttcaaaagagctataacttccatgataaatgtgattatcagcttcatagttcgcttcatctagttctgtcatgggtcttagttctaaaggaatgccattacttctaacaatagctttgaaatacattctaattcctgttgatatgtcaaccccatatgaagcaagaatatcttgagcttctttttttaatttatcatcgatttttacactaatttgagccatagtacaacctctattcacaaaacgtattactttatctatatagtactatatactataaatacaaaatatcaatttttagcgtttgcttttaaaagaattttaaaagattataggtagtcttattatgaatactaggggaaaaaactaaaagtgacatttatatctttaatcgtaatacaccagcagaaatttaaacataaacaaagctcgaagcttctacaaattgtagtaacttcgagctttttgtaactattcagaaaagataatttagcggtcttcgtggttagtgaagtaacggtagtccttactcttgtcgaacaatacggcacgagcgttttcaccgttggagattgagaagatagcgtcagggtacttgttcttaacttcatcttctaccaatcctctaagcatttcgttgttagctaaaactgaaccggttaaagcaatcttcattggcttaggatcttcgtaacggtcaagaccgatgatgatgtcacgggctaacagatgagcttgtttcttaataactttgattgcatcatcgctgccttcatcagcaagttgtgcaacgtgaacagccattcctgcaacttctgggttagacatcttgtagaatttagcgttacattcatccatgtgttcaacgccaaataatttagtaaacatttgaatcaaagcgttgtcttcacgcttgtcccagctaagaagagcagattgcattgctgaacgagcaattgcgtaacctgagccttcatcacctaagatgttgccgtagccaccaactgcgattaagtggccgttttgtaaaccgttgtaaactgagccagtaccggcaattactaaggcaccgtcatcaccttcaagaccagcgtaaagtgctaaaagtgaatcagtaatagcacgagtaggtaagttgttaattcttgatgaaatagttgcggcaacttctggagcattaccgacaactgaaagaccggcaataccaacaagaacgcgcatgcagtcaccatcaaccttgtcgatcaattcgttgatagtgtcagagatattcttaattccgccttcgtagtcagcgttaatttggcctgggccgccttctgcacgaccgatttccttgccagtttcgtcatatgcgattgcagttgagtgggtaccacctgcatcaacaccaatttggtatttaagagccatgttgtaaatcttctttctatattaatttatccgaatgataacgtatacattgtattatatttttatacagtaggtctagtaaaagttttgctgttagcgctaacagtggcttttttcttgcaaattaataaaattgttaaactaattaagctaaccaacatccccagtagaagaacccatggtacataaattaatgtaatttgatgttttcctggattcaacttgaagtttaaaaaagcattcatgaacaaggttttattcttgttaattattttgccattatctaaaactaaccagttaatgttattaggaatagttgacgccaatgtcatcatcttcttcgttgtgaaatgattagatttgatgatcaaagcaggtgtttgtttaaagtttggttgtttttgcttaaaacgatgtataatctgctcgagcttttgtgtgtttaagcgccagaagtgaatgccactaaggtctagtttatctttttttagttcaaaagtaacttgcaaccgttgaccacgctggtggctacctagattaatgagacgggcattttgatcacgtactgccagattaatattagcaccattaactgtcattgaaatggcattatcatcgatctcaccgggcatttcaatgtagtaagaatcatcagtctgtggtttgaaattgaaaatgatgcgtgcgatttgcttattgtttttacgattatattgtagttgatcgtttttcatactagttacattaattaattttgctttaggccaattgatctgcttaaacagctgcacttttgcccctgtaactgcttgaaagaatttggtttgattactagtaatatctagagagttaaaattgattttttgcgttttttgtgatgttaaaaagagtaggggcaaagcggcattatttttcactagatatagttgggaaaagcgtttttgcaaatgataatcgctggcatcaacgcggtggttggaattgtcatacttcatttgcttaccagacttgatcgttgtgatttcatcattaggcaaaagataatatttgattccaagtaaatcatctgtcaaagtagttccgccaaaattagtgtaggaattactattgtttagaaatccaagattgttgatcaggttgagtactttttgatcagaaatcgaattaaaattacttaaaccgtaataaccagcgctaaaaggatcatcatcagaacgatagaaagtcttttcagttcggtaaaatccagaatcatgttgatttgcgtattgtactgcttggctgacattagtggtaaagttctgataatcgctatttttttgataagctaaattgcctagagatagtactaggttgacgattaactcaagctcgataactaaataaaaaaatggcgcggcaaaactgtgttgatgataaataaagccaataaacaagattccgagggctagaaaagctcccgtggcaatctgcgcatcttcagttagaaagtcaaaatgtgaggcattaaatactatataaacaattaaacctaaagaaaatagagtcagaagtccggtctgccaataagctatacgttctttttgttctaatgcaataacgcctagatttagcgcaaaaaagatcaacacaaagctgaaacgaccaggataccagacagggaattggcctaaatgccagagtaaaaccagtggtgtccaaaaaagagaagcaattaagaaaatgagtaaaattccgtttgctaatttacgctgccagttaatctttttgcttaaaaaatataaaattgtcagcaacaagaaaggcattgtcagataaatgttgggcatcccttcctgcatttcatgaaagttataggccccttcggctaacttagtcagctgttcaactggagaaaactgccagcccaaattccatgaggcagtagaactagccttgccttgcaacatttcaatcagaacggggaagagcataaaggcatctaaaaatgaaccagcgatactttttcttaaataaatccagttaaggcgtaggcgctcctgcttattgatgaagaaaattttgcttaacagataaagcaaaccaaaggctaatgccataaatccggtataaaaattagtgaaccaaagcaaaaaggtaattaaaattaacttattttttcgttgggccagcaagcggtcgatggcattaatcaataaaggaagcaaaatcacagaatcaagccacatcagattatagtgattgccaataacgtagcctgaaagggcataagccgaactagccgctaaagcgtaaaagtgattagtgattttttgcttccaatagtagtaggaagatagtcccgccgctccaatttttaatgcgataataattaaaattgcttgtggcaaaaaatgttgcggaaataaaaataagagtagattgaaaggactgcagagataataggcatcagttgctagcattgaaccgcctaaaccattagaaaaggaatagattaagcgcaagggatgggagaacaaatttcgcctgaagaaggcaagaaaatcaacatattgttgacctaagtcgacagtgagcactccatttttgctgtagaaaaagtaactcaagaaaatcaaagccggtagcaaaaaactaagccagaaaaaaatatttttacgattaattgaaatgtgtcgtgagttaagaaatttaagcatcattaaaaattatataagctcccttatgaattgtagaattgatgtttactttttgttaaaatacatctagttttaataaaggtgatttacgtgaattattttagaaaaaatagtgggactggctcaaacaagcattcctcaactccaattagaatgcgaatcattctaggggtaattttagtcctctttgccatgttaattgggcaattggcttatttgcaactagtttatggttcacgtttcaaggcagaagtgcaaaaaactgattcaactgttgtttcgcatcaagtgccacgtggtgtcatgtatgacgctaagggacgcgttttagtaggtaataaagcaaccaatgctattacttatactaagagtgcctcgactacaacagcagatatttacaagatatctaatgccttgagtaattatatcaagattagcgatgaaaagccgacaaagcaaatggcagcagattattatttagctaatgaagataataatactaagatatctaatgctttgccgaagtcagccaagattgatgctgatggcaataagaagacttcagctgaaatctatcaagcggaattggcttatgttgaaaaaatgaatcctcaactaaccactcggcaaaaaacagcggctttaatctttaataagatttcaggggcttatactttatccacgatttatatcaagaataaaggcttaaccgatcgtgaaattgcccaagtaggtgagcacttatcagagcttcctggtgtgggtatcggaactgactggcaaagatcttatccaaatggttcatctattcaaagtatcattggttcggtttcaactgaaaaatctggtttaccaagtgatagcttgcagtactacttaagaaatggttactcacgtaacgaccgggtaggtacttcctatcttgaaaaagaatatgagccacttttgaagggaactaagtcgactaaccaggttattactaaatcgaatggtaatatccagcagactaagactgtttataatggtcaagccggtgccagcttaatgttaacgattgacgctaagtatcaaaagcaagtacaggctactttgaaacgggtttacagtacagctgttggtaacggtgcagcaagatactctaatggtgcctatgccgtggcgatgaatcctcagactggtgctttgctagctgtagccgggattaatcgaaacacgaacactggtaaaacgactgataatgctttaggtgtaattaaccaatcctttgttatgggatcagttgttaagggggctactgttggtggtggattaattaataaggttattactcccgaaaacaatactttgcctgatacggcaatttatttgccaggttcaccagttaaaaagtcagtttatccagttggtactttcagttcattggatgctgaaacagcgttggaagtctccagtaatatttacatgatgtacttagcaatgaaatgggttaaggctagttatgtaccgaagagctacattcatatgccaaacgatgcctttgacattttacggcgtaattttgctatgtttggcttaggtcaaaagacaggcgttgacctacctggtgaagtgtcaggaattgaaggtaagtcatttaatgacaagggtaatattctttccggttctgtacttgacctagcttatggtaactatgatgcttatacaccaattcaactagcccaatatgtgtcaactattgctaatggtggtaagagattgcaaccttatattgtgcaatcagttggtaaaactagcaaaaatggcaagaagatttacattagctacaataagaagccaaatgtccaacaagtaattccttggacgcttgcggaacttaatgtggttcaaacagggttctatcgtgttgttcacggtacaaatggttggggaactgctcacccattgaaaaatgttaagccatcaatttttggtaagactggtactgcacaaactttctactatgatgctgaacaccctaatagaaagcacaatatcgaattgattaatgcaacctttattggctatgccccatcgaaaaatccaaaattagcagtggcggttgttttcccaggattagaccctgatggtgaaggaacatacacattgcaagttgccaaagcaatggtacaagattatttcaaacttcattcaacaaaataaagaataatactggtcaaacagcttgaaaaatgctattctagtacagtcagaataaaagtgtaggtggtgaaaaaaatggcagataacatcattttagaatgcaccgaatgtggcgatagaagttacttatctaagaagaacaagcgtaagcatccggaacgtttatccttaaagaagtattgcccagttgaaagacgcgcaacacttcaccgtgaaactaagtaataaaccaagatagcaggttacgtgcctgctattttttgttttttggacaaaaagatggaaaaatcagaattaagaaaagaacaaatcagtaaattaaaagaatttgccaatactaaagaaaaaagagcagaagatgcgattttattagagaaattaatgtctacagatctaattagaagaagtcagacgattggggtaactgcttctttaccactagaagtagatacttctgaattaattgctcgtttgtgggataaaggaaaagaagtttatctggcaaaggcacgaggcgatcaaaatcatactttagactttttacgctatacgtatatgagcaaattggtaaaatctaaattcggtgtggaagaagtcgccgatgaagatgcgaaaatcaataatgatttggatttagtcattgtgccaggtttagcctttgccttagattcgcatgttcgacttggctttggtggaggttattatgatcgctttttggctaagcatgatcctaaaactgttgctttagccaatagcaagatgacgttcgatactagcatttggcctatcgaaaaaaccgatattccggttcaaacaattgttactcctgataaaatttattaaaatagtcacaatgacgaagataagggggattaaatgaatactcaacgaaaaattaacctctcacaatcatttgtgactttaggaattttagtagttttattaataatctttttagttgaagtgtttttaggtggctcagagaataccaatgtcttgatgaaaatgggagccatgaataattttgccgtggtggctggacaccaatggtggcgcctatttacggcccagtttttgcatattggcatcatgcatttggtttctaatgccattattatttactacatggggcagtatatggagccattaatgggacatgtgcgctttttagtaacttatcttttagctggggtcggcggcaatctaatgagcttggctttcagtgctgatcgcggcttaagtgctggtgcctcaacagccttatttggtttgtttggagccatgactgccattggcttgcgcaatttgcataatccaatgattgcttttttaggtcgacaagcctttgtcttagcattgattaacttagcgcttgatatttttgtgcctggaattgatatctggggtcatattggtggcttaattgccggcttcttattagcgattatcttgggcgatcgtgtaatgaagacctacaatcctaagtggcgcgtattggctgctgcagtgttagtcgtatatgttgtttggacggttagaacaggaatgataattaatttctaatgaaaactctctacgatgtacaacaattattagaaaaatacggaattttggttcatgttggcaaaagaatttgggatattgaattaatggctttagagctcgacaatatcaatcgtgccggtctgattgaccaacatgattatttgattgccaagatgattttgagtcgagaacatcgaattgaagtcaaaaatgaacaaaaaaaggcgcttaaagatccgaaaaatgatagccagtaaattagtttagcggtatcataatagatgtaagtttttatgaaagggcagatttagtttatgtcgagttttttaattgtcttagatttagttttattagtcattattttagtcatggttggtatctgggcttggaataaaattcaagctaaatcaattggtggcgaattgactaatgaagaatttaaagaaggcatgcgtaaggcacaaattattgatctgcgtgaaaaagaaccgtttaaacgcaagcatattgatggcgctcgcaacttgccatataccatgcttaagtatcaatatactgagcttagaagcgacttgccagtttatctttactcagattcaaagaccattactttgagagctgcccgttttttaaagaaaaagggttttgtttctatccattggcttaaagatggctttgaagcttgggatggtcgaactaagaagtcaaaatattaaatgaaaagaagacgcatttggagggggtaactctaatgcgctctttttttgtatcaaaattaagaaaggtgatggggatgaaaaaggtactagcgattgtaggaccaacagctattggtaagacagacttggcgattgatttagctaaaaggttgaacggcgagattatttctggcgattccatgcaggtttaccaagaagtggcagtgggaactgcaaaggcaactgcagaagaacaagcgcaagtgaaacactacttagttgatacgcaatccgtttttgacgagtattcagttaaagattttgtggatcaagcaacaaaagcgattgaagagattagccaaaaaggtaagttaccaattattgcaggcgggacaggtttttatgttaatgctttattgaataagatgcagctaggcgagaaaactccagaagagcgtagcgtttcgcaaaagtgggaaaactacctcaaggaaaaaggcgcagaaaaattgtggcaggtcttgaatgagcaagatcctaaggcggcagaaaaaataccagtagccaatagtcgcagaactatgcgagcattgactgtgattgagcgtacaggcaaaaagttttcagagcaacaaaagcagatcgagccccgttatgattacttgattattggcttgaattctgaccgtcaagagatatatcgcaggattaatttgcgtgttgataagatgatggagcaagggatgctcgatgaagcaaaatttatttatcaaaatcgagcacgagagtatcaggtcttgcaagcaattgcgtataaggaatttttcccttattttgaagggcaagagacgctagagcatcgcattgaagatttaaagacagcttcgcgccgctatgctaaacgtcaattgacttattttagaaataaattaccagtagtttggtttgatccgttagatgatccgggttgcgaacaaaagatattgaagaaagtcaaggaatggaaaaatgaataatttgccagaaaaattacaaaaaattgttaaagaagttgatcaacagatcgcacctaaactggttgagattgaagatcaaattgtctataatacggctaaagttttggcggcttaccaagctaatgatgtcgctgaagccgatttaaatggggctaatggctatggcgacgatgatatgggaagagataagctagataagatctatgctcaagtttttcaaactgaagatgcggtagttcggcctcaatttgtttcaggtactcacaccttgtttgtagctctagcaggtaacttgaaatacggcgatacgctaacttatttaactggacagccttacgatactttgcaaaaagtgattggcttgactgatgataagcgtggtactttagtcgagcgcggcgtgcatttttcatatgtgccgttaaccgatgatgggttagttgattatgacgaggctgaaaaggttcttaaacgtgatcagcctaagatcgttgccattcaacgttcacgtggctactccaccagaaagacctttacagttgatcagattaaggacatgattgcctttgttaaacgggtcagccctaagagtattgtctttattgacaattgttatggcgaattttcggaaaaacatgagccaactgagtatggtgctgacttaatggcaggatcgctgattaagaatgctggtggtggtctagctaagaccggtggttatattgttggtaaaaaggacctggttgaaaatgcaaaacttgcattgactgctccaggctgcaccgatgagggcgccactattggcaatttgcatgacttttatgaaggctttttcttggctcctaatgttaccggtatggctgaaaaggggatgatttttgcggctgctttgtttgccaaaatgggcttgaatgttaccccagcttgggatgagaagcgaagcgatattattgagacaattatttttggtgatcctgataagatggttaaatttgtgcaagaagtacagaaaaactcaccgattgattcctttgtaacgcctgaagctgtgcatatggagggctatgaagataagattattatggctgctggtaatttcgtttccggttcaactattgaattttcagcggatggtccaattagaccaccttatgcggtttatatgcagggcggcttgacttatgcgcatgacaaagtagctattattaacgcggttcgtgatacattttttaacaaaaaataaaattcccggatttaaaattgaagtgcaacactaagtgttaaacaaaaaggccatgaagacctaaacttgaagtgacgaaaaatcaagaaaggaagatctttatgaccaattcaaattctagcatttctaagcactatcatcaattaaccagcgtacaacgtggacaaattcaagcaatgctggattccggcataacttcccgtactgttatcgctcaagaagtcggctgccataagtcgacaatcagtcgcgaaatcaaacgcggaagtgtcctgcaaagagacagcagctatttattgtatgagcactattacgctgatactgcacagatttattatgagaagcgtcgcaaaaactgctatcagcgcaatccattgaagcattatgctgtctttttgagaatgctctccagacgctttaaagctaaatttgatgccaccagcatcgatgagttcgttggtgaattcaaaaggactatgccaggctacccttgtcccagcacaccaactgtctatcgctatattgatcagggcttgctggacataagcaatattgatctgcctatgaagctcaaaagacgcaggaacaagcgtcatcacagccatggcggtcacgctttgcacaagaagcatcttggcaattccattgaacagcgtcctaaagagattgaagacagaaaagctccgctgcactgggaaggagatctggttaaaggcgtcagacgcaagaatcagcctgctttaatgactttgactgaaagaaccacacgctttgaagtagttatcaagattcctgactatcgggcaagcacatgccaaaggctgcttcaaaaggagattgacagacatcctgcctggtttaaatcaatcacgtttgacaatggctctgagtttgcggatatgaccaagatcaagggctgccagatttactttgctcacccatattctccatgggaaaggggcaccaatgagaactgcaatggtcttttgcgtcaattcttccctaagggcaagagcatgaaagacaagtcaaaagcttatgttcaacaggcaactgatgccattaaccacaaatatcgccgaatcctccaatatcacacagcagaagaactcttcaagcaatatatttcctcatagcctaactgttgcacttaatttgacaattcaggaaaaaataaaatttaaaaataatcactagaccaatttgacttttttaaattggtctgctattgtattaaacagttctaggagataagaataaatcataggaccataccaatttaatattttttgtttttataggtgaattaactatgagtaaacaatatactgcagaagaaattaagcaagaagttgaagacaaggacgttagatttttacgcttggccttcactgatattaacggtactgaaaaggccgttgaagtacctaagagtcaattagataaagttttgactaatgacattcgctttgatggttcttcaattgatggctttgttcgtcttgaagaaagtgacatggttttatatccagacttctcaacttggacagtattgccatggggtgacgaacacggtggtaagattggtcgcttgatttgttcagttcacaccactgatggcaagccatttgctggtgatccaagaaataacttgaagcgtgttcttggtgaaatgaatgaagctggattcgacacttttgatattggttttgaaatggaattccatcttttcaagttagacgaagatggcaattggactactgaagttccagatcatgcttcatactttgacatgacttcagacgatgaaggtgcaagatgccgtcgtgaaatcgttgaaactcttgagggcatgggctttgaagttgaagcagctcaccacgaagtaggtgatggtcaacaagaaatcgactttagattcgatgatgctttgactactgctgacagatgccaaacctttaagatggtaacgcgtgcaattgctagaaagcacggtttgtttgcaagctttatggctaagcctgttcaaggtcaagctggtaacgggatgcacaacaacatgtcattatttaagaatggcaagaacgtcttttatgacaaggatggcgaattccacctttcaaatactgctctttacttcttgaatggtattttggaacatgctcgtgccattactgcaattggtaacccaaccgttaactcatacaagcgtttaattccaggttttgaagctcctgtttacattgcttgggctgctaagaaccgttcaccacttgtacgtattccaagtgctggtgaaatcaatactcgtttggaaatgcgttcagctgatccgactgctaacccatacttgttacttgctgcatgtttaactgctggtttgaatggtattaaagaacaaaagatgccaatgaagccagttgaagaaaacatctttgaaatgactgaagaagaaagagcagaacatggtattaagccattaccaactactcttcacaacgcaattaaggccttcaagaaagatgatttaattaagagctcattaggtgatcacttaatgcacagcttcattgaatcaaaggaattagaatggtctaagtactcacaatcagtttcagattgggaacgtcaacgttacatgaactggtaaaaataaataagtaattggaaaatctcgtggtgattgaggccacgagatttttttgtaaagtatagatttttcaaaagcatatctaatcgtaattagtctaattacgattagataagtgaacttatggataagtttttaaatctagtaggataaacttttaccaaaaatcaaaaaatattctcttcaaagaagagcaaactgctatataattgtaataatgactggactggtatccctaattagtttagggatacttttgtgttaatgagaatgtattggagtcgatggaatgagaaataagacattagtagcattttgtttgatagctgcaatgatcaatttaactgcttgccaatcgcaaaagcagactaataatcgccaaactattgaaaaatctggtgtgactcagaaacagactcccaaaagattaattgttaagagtatgtcagatactgaaaaatctagtgcaatctcaatttatggatcgatgaaatatggggatgcatggaagactgcatatagtgatgccaagaaaaatcatttgagcattagtgtaaaaaatcgaactggttttaattggataaaaaaaggtagaggttacatttatgaagtaactggcaatggtcaagaaaataatgctttttatacaatgaaaagtgaaaccgtatatttttataatcagaagaaaaatttaggtgtagcaagtttatctgaaatagcttcatatttaagtgaacataatcaagtaaaatctgtagaaaaattagcaactaagactactttggctgctgaagttacatctgacaaatatggggttaagggtgacgatggcctagcattagttccaacgagactttggggtacttggtacaactataaaggaaagaagttagtaattactgatcatactgttaatggtgaagaaattcatcatatttctaattctggtgtagcagcagaatccttagatcaaacgaaaaagtgggctagagctcggatcgaaaatattaatggattaaattgctatcatgttcaaacattgaatgctcaagattttggcttactttattctgtccaaaaagataatggcaatacggcagtagtaacttatagcgttgatacaggtcattatacggctacttattggaagagcaccaagatagccaaggaacaccgaaatgcagaatttaagactttaaattaatatttgtaaagaagtattaaaataattgcaatgaacaagaagtataatttttgtaaaataatcatgtaagaagttggcggatcgtattttttataatactattaagcaaagagatagaattattgaaagaaaaggggattccttttgaaaagtaaattaactgttttggttgcaatttcagctgctttaactttagcaggatgtagccaaagtacacaaggtaatagtaattcacaatcacagtcagaaaaatcaagtcaagtttctaagagtaactcagaaaaaactggcacctcagaatcaagtaacagtcaaaactcagcaaaattatctgctgagaatatggactataagacgcaggctagtgcaatctctgtctatgctgcacaaaagtatggcgacacttgggaaattgcagttaatgctgccaaaaatggtaatttaggtgttgcgttcagaaccaaagccgcaacaggtattacttctgatgactcaggatatgtttatgaggtctccggtaccggtaaaagcagtaatgctcgttacatgctaaacggagatggagcacaaaagaaaattactatttttgttaagcaaagaaaccttggtactgtaactttacaagatgtagttgattacattaataaaaataatgatgttgatctagttcaaagcttggctaaaaatgccaaactaaatgttaaacttgaaggcgataatgacaatgcagctggtgctaaggaatctgctagtgccgtaattccatcaagcttgcaaggtacttggtacactgcagatactggcaatggcaatatcgatactttgactgtaactgctaataagatcaatgatgaagctggttttagcatggatgtaaaggctaaaaattcaggttcatcaactagttcaggctatatgaaacaagctactattaatggaattaatttctatagttttactaatatgggtcaagaaccaggtcaaggcagtacatatttggcaccgcatactgaaaatggtcaaagtgtaattgtttcagctaactctaagggaacaactaatgctgtctactggaagagcgaagccttggctaagcaaaactccaacaagcaatttagcgatctacagtattaaaagtgaataaaatatagaattaggcgatatctttgtgatatcgccttttttgttgtgaaaataaatttctaaaattatggcacttcctttcaaaacatatgtttgatataattgtaaaagtgtttgggcagactaatgaactgactattgagtaataaggaaaggaattatatggattttttagctcaaaagaaggaataccgttttaaaaatattgaaaatcaagtgtgtcgtgttcatactcatttggctattaacaacaataatttgaaagtttggagagaaaatgatgataagaaaagtagaaaggctactaagttaataatggattcactacaagatgacaataaatacatgtttcctgatttagtaatagttagttcaaaatatttgaaggtagtagctgcttacgatcgcgaaaaagatgttatttatgttaataaaggtatctatactcatcaaattgttaaatcgcatttaaagtcaagttatttcgttgctaaagatatgagaggaattttgtggcatgaatatggatataaattacattgggatgcagttaaaagcttttataaagtacataaaagtaagtataatgatatatattaaagaagcaaagatgttttttgattctaaacttgagcattatataaggctacagtatcctggttatcttaggaaagtaatcagttcgtatgcagaagatagttactttaaagaacataaaataaatgaggtagtagctgagttttctgtgataggaaatacgtgtgataaagaattgaatacaattattagggggatgctagaaaatgcaagtgctaaatgatttgaaaatgccgaataaagaaacactatattttaatgatcatattgtcccttggatagaaaaagaagagtgggctaataatgagcatacagaagtcgctttaacttttaagaaaaacaccccagtagatattattaataaatttttgatttgtcgatctgaattagcctattaactatactgcagattataaaattgtataggaagaccacatgttgtatccatatgcagaatttcctggggaattgtcaattacatattctcaaataatggtagacgataatgtaaagggtggtaaaaagcttttggtccactttgaacaaccgacagattatggatttaaagaagccagatatgagttgcctgattataaagaaatttacaactacgactttacaccttctgaaactagaaataatctagatattcttaagagaaacgaaagtctaatttggaagtgtgccgaagaggagaaaacaagtacctaattattttcggcttaaaaattttactatgactacaattgattttcatgactaataagaagaactcactataagtgggttcttttttaataattacaccactataatatcttaagtaaagctaaaaatgattcagttagaaaagagtaaatatgaaagtcttaaaaaaagtgggattagcgttgttgtcagtgatactggcatgtgtaattatcttctgtggctattatatatatttgtctctacattattatcgaattcctgataatcaaagattgaaaattaataacaatcagtctcagttattaaaagcgggggcgtagctataagacaacgacttataatgttggctttggtgcttataatcatgatttcgacttctttatggattcaggtcagttgaaggatggcaagaaaccgcaggggcatcgagggacagcaatatctaaacaagcagttcttgattccactaatggtgtcattcaaacaatgaaaaagcagaaccctgactgcatgtttttccaggaaattgatactgattcaactcgtagctttcacgttaatcaggtgaaaaaggttgaagatgattttccaaaaatggattcaacttttgctagtaatttccactctgcttttttagcggttccattgaacaatcctcatggcactgtacgttcagggttgttgagtatgagcaaatataagatggatagtgccataagaagaaaatatcctgtttctagtgggcctattgaaaaatttgtcgatttagatcgttgctttgtagttatgcgctttccagtaactaatggaaaagatttggtaatgattaactcacatatgtctgcttatgataagggcggtaaaatgcgtaaggcacagatgaaactgatttcttctgtgatggaaaaagaatatcgacgaggtaactatgtcattgtcggcggcgactttaatcatgcgttagggaaagacatgatgactcattttgagcaccaagaagaaattcctagttgggtatccgttcttgatcaaaaaatgctgcctaaagatttcactatgattaaggcgcaaaatcgcgaaaatgttgcgactgttcgtgctacagacatgaaatatgatcctaaagttaattatatgaccatttgtgatggctttattgtgtcgaaaaacgtgcaagcaaaggcgtataacattaatactcattttgagtatgcagaccataatccggttaggttggagtttgaacttaagtagatttggacaaaatgaaaaacactggatcatgaaactgtagatttatgatttagtatttacgaaattaacttatgaggtaaaatctaatgaaaaaagaattatcatataaaggttattatggttcagtggagtattcattagaagatgatactctctacggtaaagttattgacatcaacggtcttttatcatatgaaggccaatatggggtgaaataagatgagtaagattcaagagttcatcaagaaagatattgagagacatccagaattaaaaaaagaatatgaacaggtagaccttgatttagatgcttcagtattagttaaagatatgcgcgaaggttgggaaatgagtcaataagactaactgaagaatagttagtaaaataatgaaaagcattaaaattatatttgacttttaaaatgatttagactattatcttaatcaacataattattaattatttagcgatgataaggaaagtaaattggcggtccttctacagagagttatcacttggtgaaagataatgatcgacctacttttgaaaatggcctttgagcttgaagctatgaagtttttagtagcttctgggtccgcccgttatagcggtaacgtatcgccagacggccgtacgcaattcaaggtggttttccataaagataggtggtaccgcgttactgaacgccctattagatcaagttgatctagtaaggcgtttttctttttaccgtttttagcaaaggagatttttatgagaataaataaaaaagttgtttcattcggattaatagctttaactacggcaaccttagctgcttgtggtaagcaatcagatagtaataccgtttcaaaaaagcaggttttaaattggtcagagatcacacagctttctacgcaggatccttctttggcaactgatactaccagttttcaagctcttcttaataccggggacggactataccgccttgataaaaacaataaaccgcaattatctctagctactaaggctaaaacttctaatggcgggaagacttatgatttttatcttagaaaaaccgcaaaatggtctaacggcgatccattaactgctaaggattttgtatattcttataagcgtactgttaatccagtaactaagtctcagatggcattctatctttaccagatcaaaaatgcgcaagcaattagtaagggccaaaagtctccggataccttgggtgtttctgctccttctaaatatcatttgagaattcaattaactagaccactgccttacttcaagattttattgtcgtggccattatttttcccgcaaaatcaaaaagtggtgcaaaaatatggcaagttatacggcacgcaagctaaatacacagtttcttcaggcccattcacgcttactagatggaatggtaacaacaagacttggactttaattaagaataagaattactgggatgctaaaaatgttaaattaaataaagttaatgaacaggttagcgaatcaactacgactagctataatctttttgaagcaggtaaggcagatgagactggacttactggtgagcaagttgccgcaaataagaataaagcaggctaccatgcacgtttgtcttcagcgattaaaagattggaacttaacgaaaataaggttccagcattcaagaatcttaaggtacgtcaggcattttctttagcaattaatcgcaaacaattagcaaataatgtcttaaaagacggttcaatcccagctaaaggcttcgttccatcaggtatgggcaataatcctaagacaggaacaccatttgaagatgatgcttacgttaagagtgcagtatcgtataatcttgctaaggctaagcaattacttcgcgaagggtataaagaatctaagactaactcaattaaaattaccttgttagtttctgatgacgatacttcaaagcaaacagctgaatttcttcaaagtaagctagatcaacttccaggtgttcaaatttctgttcaaacaattccatatactcaattgatttcacgtcaaacagctggtaattaccaagctacaattaaaaactggcaggctgtctttggcgacccaatcaacttcttggacgttttccaaaaaggatcaagttatttgaacaatggttggaataacaatcaatttaacaagctgttgaatgaatcagaaaacgtatatggcaatcaaccagtaaaacgctgggcaagattagtagaagccgagaaggtattgatgaaagaccaaggaactattccattagttcaagttgctaagccacaattattaaagactaccgtaaagggcgtttcctttaaccctacaggcgttccatacgattttaagaacgttagaattggatagaaaaatagccgttgattacttgtataaaaaacaagttttcaatggctttttttctgttttgtgctaatacctaaaaatatccagttagatttcaggtaaaacacttgaacaaaacaaaaacgccttcaataacagaagacgttttctagagtgcgaagtattatgaattatccaattaatctcttcaccataattattatatcaggtatataaggttaattggttaatactatctatgaaatatagttaaatcagatataacaaacgataatcatatcaggctatttgttgtatgcatcgtatttttcatttaagacagaagtaatagttcgagtcattctatcgtgatatttattattctttaaaagtagcgtagtaattacgtctattacatacattattgaaaactgtgagttaataaaccgagcgtcgttaatataatttgtatcttgaacaccaactacaatatcagcaagctgagctaatgggctattgtcatagctagttaatgctacaactgtagctttattcttttttgctagttcaatggctcttaccaaggaatctgtgctacctgttgaagaaatagctataatcaggtcatcttttgaaatgatactgctagtcataaacatattattactttctgtttccgcaaacgcagatatacccattcttagtaatctttgagtagcttctaagctggtatatccagaagaaccgataccataaaaataaactctctttgcagatttgatgagttggattatcttttttaattgttttatatcaagtttattttgtgtttcagatagaactcgattgtaaaaatcatatacttggtgagcggtcgttttagagttatcttgattagtaatagtatttacttgtgaagaagctgcagcagcagccaatttgacttttaaatctgtaaaactagagcagttaactctacgtgcaaatctagtaatagtagcattactaacttttattgttgacgctaattgatttatatttgctgattgaataaactgtgggtcctgtaatataaataaagcaatttttctttcttgctgaggtaaatcgggtagcctattttgtaaatcagttaaaaacgtcatattgaaaaccttcttaatgtgttaaatcaaaaaaacagagaaagattttgtaatctttctccgcttaattatgctaaatttgtagttttttggcaaataagcaattacttattaaaatatttagcgtagatttcgtcagcgccttcaataactttatcagtgtatttagccattggttcacggttgtagccagcatgtacgcccatcttttgcaatactaacttaattgatgggtaaataccgttattaagaagggcagtgataatgtcgttcttcttgtgttctaattcttgtgccttagcaatgtctccgttgttgtaagcagcaatttcttctttaaccattcttgcattaacgttgtaggttgatccgatacagccatcgacaccttcaattaaagcaggtaacaacatttcatcgaatcctgaaagaataagcttatcagggaagcgctcacgaagtctttcaagtaagtagaagtctgcattagtgtacttaacaccgataatctttggatttgagaataatttagcaaagttatccaatgaaagtgaaacacctgttaatgcagaaattgagtaaatcaataactttgcatctacatccttaacgatttcatcgtagtaatgcttaatttcgtcgaaggtaaagttatagtagaaaggagtaactgcagaaattgtcttgtaacccaattcagtaacgaacttagctaattctttagcttcttttaagtttgggccacccacttgagcgatcaagtcaacttgttggtcaacttcgtcccaagcaatttcgaagatcttcttcttttcttctaagccaagcataaagttttcaccagttgaaccgccaacgtataacccgtcaacaccttcaacatcgatatcgtgacgaatgatttcacgagtacctttttcatcaatattaccatcttcatcaaatgaaaccattaaggctgcataaactttttgcatttgtttgacctccgtttagtcaaaataaaataatatttttttaattactgtataactaatggcaaattcaaccaacacctgcagtatagaacatgaaaacgctttacgcaactctaaattgcgaaaataattttcagaaattgaacaaagcgtaggtgtatcaagagatacagagcacgaaaattattttctaaatttttatttgagaaaattgtttttaaatgatactatgaaagcgcttaatataagaacttgattatacaggaaggcgtgaaccaaatgagtaagaaatatttagcttttgatgttggcggaaccacgattaaatacggtattgtagatgagaagcttcagatttcagatagaggcaaagttgatacattacataataaggacggacatattttgaagtcacttattaaagttaccaaagagatgatacagaagtatcaattagatgggattggtgtgagtaccgccggtattgttggagacgatggaagcataatgtatgctggaccaactatttctgactatcaaggtactcccattaagaaagagctagagcggacatttaaaattcctgtcagtgtcgttaatgatgttagtgcggctttattaggggaaaaattagctggaagtgttaaaaatgctagtactatctattgtgttgcattaggaacaggaattggtggtgcattttgggcagatggacatttatttaatggatatcatcaaacgggtaattcaataggatatacattatttgatccaataacatcaactaactatgaacagcggtcatcaaccattgcattacaaaaagaattagaacccttaggtattgatcctattgaagcctttgcacgtgccaaaaaaggaagccttagagaaaagaaaattattgatgcttgggccttgcaagttgcagagggcttaagcagtgtattattacttcttgatccagaagtattagttattggtggtgctgtttccaagcagggagattatttaaaagatttgttggacgaaaaattgaatcagattttaccgccaaatctatgtaaaaccgtattaaagatggcttctttaggtaatgatgcacaactttatggaggtatttctagcatttttgaaaattaatttctagaaagcgcttgcaataaaattgttttcgtgtatgctagaggtgtattaactaatagcaaaattcaaccgtacttatgtgaggcaaatgctgagcataattgtacggtttttttaatcccgtttattgaagaaaagaggcaagtcatgaaagtttcagtgaatgcggcaatctttgttgatcgtttgaatagcggagagagtcaaattgattgcttagaggatgtttcaaatttgaaagataaaattgacaatatccaagttcgtggagaattctttaaagaaaacaccaaagacgacgaactcgaagcaatcaaagcattgtgtaaaaagaacagttggggattgtattattcagttcctgaacaatttttcattgatggacatgtcaataacagtttgaaagacaatgttgaaatggcaaaaaagcatcaattgaagcatttgaagtatttcgtaggtgacgttaaagatgttgaccaaaaggaaattgaggatgctgcgaagcttcttgaagatgctaacgttgatttgacattggaaaatctttctaatgaaacaggctatttaagtactgttcttaaaggtcttgaagcagtaaatcaatatcctaatattggcttcacttatgatgcaggtaattggtactgggttggtgaaaagcctgaagttgcctttaaagaattaaaagataaggttactaactatcatctaaaggatattaagaataaaaaaactgtgatgttaggtgaaggaactacagattgggaaccaatgattttaggacttgatcctcaaattccaatcttcctagaatatggcattgatgataacaagattgaacaagaacttgacaaggtcaatgctgttatagacatgcggtaggtgactttgatgacgtaccttgtacaactatttttgattctgctattaactaaaattgcggcacacttttcagttaaggcaaaaatgccaagtgtaattggagaattattagtcgggattttagttggaccagctattttaaattggattcagcccaccacattcattaattatttttctcaactaggtgtaatcgttttgatgttcattgctggcctagaaggagatttgaaattattaattaaatattgggctccagctttaactgtagctactttaggagtaatttttccaactggtacagcatatcttctgtgccatacggcttttggattttcagtaaaagcatctatatttatgggcttagttttaagcgcaacatctgtaagtattacggttcaagttctaaaagaaatgaatcgtttaaatactcgtgaaggtgcaattatctgtggtgctgctgttgctgatgatattatctgtgtcattttattaggaatttgctccagtatctacggtggtggtcaccatacatcaatcattaaaatgatcattccgatggtattattctttatcattgttttgcttattggtaagtatgttgtgccaaaattcttagatatttttagtgatcttaatgcttctgaaagtgatacagctggtgcgatgattctttgttttggtgcagctgccttagcagttgcaatgggaatgagcgatgttttaggcgcatattttgctggtttagcaatttcagaaactaattatgcagacagattatcaacaaaaattgagccaattggttatgcagttttcattcctgtgttctttgtaagtattggcttacagattagttttaatggcatgggtaaggacttattgtttattgccttactaataattatagccatcttgggtaaacaaattggttgtggtatcggagcaaagatgttccatcttaattggacagaagcaaatattgttggtgcaggtatggtttcaagaggagagatggcactagttgttgctaatgtagctcttcaatcacaattaatagatcaaaatcactatactgcaatgattgttgtcacagtaatcacaacattgattgcgcctattatattgaaacttttcataatgcgaacacaaagaaaagaagtaaaaatgaattaaataaaaggggagaaaaattatgtcgaaaacaggattcggtatgtggaacaggatcgtcttaatcgcatatttgctagcgatgttaggcgttggtgcttactttactaaacgggcaagtaaaagtacagattctttcttcaaagctgaaggtaaggtgcctgcttgggctgcaggatttagtatttgggctactactttaagtgcgatcacgttcatgtcaacaccagaacaagcttttttaactgactggggttattcgattgggacgttaacaatttatttaattattcctatattaattaaatggtatgtacctttcttcagaaaattacaggttactactgcttatgaatatctggaaaagcgttttggaccagtgatgcggtcactcggaagtttgctatttatgctttatcacattggtagagtagccattgttatttacttaccaattttggctattacttccgtttcaaatattaatccaatattgattgctgttttagttggtgcaatgtgtattatttatgcattcctcggcggtattgaaggtgttatttggacagatgttattcaaggtttccttctccttggtggtgctttattaatttgtattttagcagtcgtatatactggtggacctgggaagatcgcacaagttgctgtagataattctaaattcttatctgctaaagattggaatcctaacaatttagctatgttcattccagtaatctttgctggtcaattcttcaatagtatgtatcaatataccgctagtcaagatgttgttcagcgttatcagactactccaagtattaaagcaactgccaagtcactttggacaaacggttggttagcaattgtaactatttttgtattctttggtatgggtactttcttgtattgttattaccacacgatgggaagtttaccaaaaggttttaacactagtgctattgttccatactttgtaattaccaagattccagcaggtttagccggtttaattattgcaggtatcttcgctgctgctcagtcaactattgcttcaagtttgaatgctatttcttcatgtttcgtaactgacttcaagcaaagatattttgataagaaatggaagatgaatgatgttacactagctcgtatcattattgtcatcgccggtgtatttagtttaggaattgctatttacttgttgatgggtaatgcatctcaaacttggaatatcttcctttcaattactggtttgtttggtgttccagttgctggtatttttgctgctggtatctttactaagtcagccaaccgtgttagtgctgtctggggcgtattaattagtgctgctcttacttattggtgtcaagtaatgggtgttgcaacattggtacaaccaattgtagccttcattagttcattcgtaattgcttggttaattggtttggttactccaaaatatgcacatgatatcacaggtttaactgctaaaactatcaatgagaaggttaaggattagttgaaaaaggtgaaactataatgaaagattcaatgtccttaaaagatatggagtcatatcgaggtagattagaagttccagatgattttgatagtttttggagcaaagaaatcaaaaagatagaagcaaagccatttaaattaattaaaagaaattttggcgataatattaaaaacgttgttttttatgatttgttcttcaaaggtactgataacggaatagttcatgctaaatgcatttttccagcacatgaaaaaaatattccagtagttttctatttccatggttacatgggacaagctctcgattgggttgatttcatgcaatatgctgcgataggtgtaggcgttgttgcaatggatgttagaggccaacaagggcagtcggttgataacggtacttatgctggaaataccgttttaggccacataattcgtggagcagtggatggaccagatcatctgttttataaaaatgtatatctagatgtatacacgttaattgaaacagtcgcggatatgtcacgtgtagacaaggaacatctatattcttggggtggatctcaaggtggtgctttatctttgattgctgcggcattaaatccacgtattaaaatgtgctactcaatacccgtttctttctgatttcaagcatgtactagaaatgggtgatcgaggattgccatatgatgagttatttaggtattttaagttttatgatccatttcataagacggaagacaagttgatgcgtactctgtcttatatcgatgttaaaaactttgctcatagaataaagtgtccagttttaatgtttacaggacttgaagatgatacttgttttccagcaacgcagtttgcaattttcaataggatagaaagccctaaaaaacacatgctgttaccagaatatggtcatgaagcaatgttttattatgttgatagtgccgcatttaactggctatttgatactaagttcccagaaaatccaccggacactagtagtaatgctttagaataaggtaaatttttaggagataaaaatgaaaaaagaagagtttattcaaaaagttcataatggattaattatttcttgtcaggctttacctggcgagccactttacaccgaagagggtggcataatgcctctgatggctaaagccgctaaagaagcgggtgcagttggtttgagagctaactccattagagatattaagcaaattaaggaagtagttcctgacctgccaatgattggtattattaagaaagaatatccacctgagaagccatttattaccgctactattaaggaagtagatgaattagctaaaacagatgtcgaagtaattgcacttgattgtacattgcgcccacgtcatgatggtaaaactgttgcagaatttattgatgaaattaagactaaatatcctgaccgtttattaatggctgatacttctaactttgaagaagcaaagaatgcttatgatgctggtgttgactttgttggtaccactttgtcaggctacactgaagaaagtcctgtttcagatcatccagattatgatttagttaaagctttggttgatgctggaatgccagttattgctgaaggaaaaatccacagtccagaacaattaaagaaaatgattgatattggaccagccggaattgttattggtggtgcaattacaagaccattgcaaattgctaagacatttacgagtgtttttgaataaatgatcttctgattagttataaatttcccctctcccaaaacaagctacgtttgtaaaaggcagacgtagcttgtttatttttggttataaagtcgaatttttatagaaaaagcgaggtataaaatgtcatattttattcatgcaaagaagttttatttagatcatggtgttgaagaacgaggatacttagaaattcaagataatggacaatttggattttattattctgaagatgaaaaaccaaaaagtgctgcaattttagatttcaagaatttctgaaaaacttcttcaatatggtgtaacaagttggatgccgaccacagtaactacttcatctgagaaattagatgaaatttgtaaaacgtttgctgcacataaagggcaggaaaaaggcgcaaagatattaggtattcactttgaaggctcatacttcactaaagaacatggcggtgcagaaaatcctgagtttatggaggatccttcaattgaagaatttgataagtggtacagagattctgatgggatgctgagaaagatatcactagcaccagaacgaaaaaatgtcccacaatttgtcagacatatcgttaaaaaaggcgtagttgcttctttaggacatactagtgcaacatatgaagaagcacgaaaagcccttgacgcaggagctacaatgtttaatcatacgtttaatggtatgaacttattatctcagcatacacctaatattattggctgtgcattaacagctgacgatgtatttgatgaaatgatagctgatggtcaccatataaagccgatcattttgcagatgttgtttgatttaaagggacctaatcatattgtattaatgactgattgcttacgtactggtgggatgcctgatggtgaatatgtgcttagtggtatgaaagtaacagttaggaatcacattgcattgttagaaaatggtaaattagctggcagcacattgactttggataaagcagtaagaaacttagtaaattggaaagtatgtaagccatatgaggcaattaagatggcaacatatactcctgcacgtagtctaaatgaaaactgtggttgtatcctgccagatagggatgctgattttaatgtgctagatagtaatcttaatgttctaaagacttttgttaatgggaaagaaaagtatagcgtaaagtaaaaatattattatagtgtgaaaaaggcataggttgtgatatgaacctacgccttttcttatagttaatgtcttctttatctacttgaataatgattttctaacaggaaattgtaaagaatttgagactgtaaaatagtttgtgtaaggatgaataattccttaaatttatttcttaaaacattagaaaaaggagttcctttctcgtatgattggtttgaacaaaaaaacacatacagaaagaagaactccttcatgaatgattttaccaaaaatatagcacaagctctattcaatcaagacaaaataaacgatttattgcgcaaagagctacaacaggctgttaataacttgctagaagctgaattgactgcctttctgggctatgatccctatgccagaaatggctggaatactggcaattctagaaatggtgcttatttccgcaaggttgatacccagtttggaccaattgaagtgcaagtgcctcgagaccgcaacggtcagtttcatcagcacacgctgcctgactacaagcagcactctgatgttttggaaagcacgattatcaagctctactccaaaggcgtaactaccagagaaatcgctgacttgattgagaaaatgtatggcagtcattatagtccagctcaagtatcaaatatttccaagcagatgctccccaaggttgaggcttatcacaagcgcaagctaagcgacaagtttttctgtgtctatttggatgcgacataccttcctttgcgccgagaaacgtttgagcgtgaagcagtatatattgccattggcattaaacctaatggacataaggaagtcattgattactgcattgctcctagtgagaacattgaagtctggacagagatgcttcaaaacatgaagtccagaggcttgaagcaagttgaactctttctttctgatggtgttgttggcatgaaaacagccttggccaggacttatcctaaagctcattttcaacgctgcttggttcatgtcatgcgcaatatctgtgctaaagtccgggtggatgaccgcgaaaagatcatgaacgaattcaagcagatacatcaacagacaagccaaaaagaagctgcagctgtcttgcatgaattttatgcaaaatggaataaagcttatagccatgttatcaaaggtttgagggaaattgagcccgatctgctggtcttctacaattatcccaaacaaatcagagcttcaatttattcaaccaacatgattgaatcctttaacaacgtcatcaagcgtaaagctaagcctaaggcagaatttccaactgaacagtcgcttgatgtatttattggcatccaggcaatgagctacaatgaccgctatttcgaccgaattcataaaggctttggtcaggttcaggataccttagaatcctattttgattaaataaatgattaaaaaatcaatttacgagaaagaactatttacacaaaagatttgacagtttcgattgttactactggtgccggcacaccaaaaccatatatgtctgatttaaaagctgctggaattaaggtaatgccggttattcctaatgttaagattgccaagaaaatggaagaaatgggtgctgatgcagttatcgttgaaggtatggaagccggcggtcacattggtgggactacttcaatggtattatggccacaaattgctgacgcaattaatattccattaatcgctgctggcggtatcggtgacggtcgtggtgttgttgaagcatttgttgctggtgctgaaggtgtacaatgtggtacaatcttttcaattgctaaagaaagcccagtaggtgataactggcgtaaagctgtcatcgatgctactgatactggtactgctgttgttggctctactatcaagggtggtgctactcgtggtattgctaatgaggaagctggcaagttgtttgaacttgaaaagacaggcgtatcaagagatgaatttaattcagcattgaacaagggactatacgttggtgtaagagaagatgaccctgataagagtttctttatggctggtgaagttgctggtctaattaaagaatctaagcctgctgcagaaattgttaaagatttaatggatgatgctcaaaaagtattgaataaaaacatcgaaatcatgtaatttaaagccattttatggctgtggaattaatacataaaatatttataatcaagcattaaataaaggcgaatgtaatttcgccttttttattattattataagttataaccaatagttatgataatgctaaaaattaatgatttcacaatgctagatgtaagcggtaccttataagtgtcaaggaattaaatgattccaaaattctactaatttgaaacatactctcatacatattattaaactcatctggtttccaattcagtagaaacgtagttagttagatttaaacataggaggataaatctatgtctgttaaagttattgacagtaaaactgcagcagaattggtcccagataacgctagtgtagctcttgatggctgccttggcactgatgtcgctgaagaaattcttgaaatgatgaaaaatagataccaagaaactggacatccaaaggatttggatgtttggtatggatgtggtatcggtgataacaaaggctcagccgttgaaaactttgctgaaaaaggaatgctccgtcgagtagttggtgggcttgggtcattagcgccaaagcttgcaccaatggttgcggataatgattttgaagcctttaatttcccacaaggtacaatttcacaattgtttagagatgcagctgctcaccgtccagttctagtaactcatactggattaggaactttcgttgacccagaaaatgatggtggtcgtttaaatgaagctgcaaagaattctactttggtaaatagaattaagattcatggaaaagattaattagcttatgaaacaccaaagccagatgtatcaattttccgtggtacttatgctgatgaaaacggcaatatcacatttgatgatgagcctttaaccatggctgttactgctgttgctatggcagctcacaacaatggtggtaaggtaattgttcaagttaagcgtgttgttaaggctggtagtcttgatccaaaggccgtcagagttcctggcgttttagttgattatgtagttccgactgataatcctgaaatgactaaacagactaccgattacatttacaatccagatattattaagtctaatattgtaaaagacgttaagcaaatggacttacctcttgataaaaagaaggttattgctagaagagctgcattcttattcaatcctgataccgaccattgtgtaaacttcggtattggtcaatatccaatgtattgcgcaatggttatgaaagaggaaggattatctgacaatatcgtaactactgttgaagcaggtacattcggtggcacttcattaggtggtggtagttttggtacagctattgctcctcaagctactattgatgaaccttacatgttcgatttctacaacggtggtggacttgacgcaacttacttaggtttagctgaagctgaccaatatggtaacttaaatgtttcaaaatttggtcctaagattgccggtactggtggtttcgttgatattactcaatatacacctaagattgtcttcactggtacgttcactgcagctggacttaaggaagaaatcaaggacggtaagttaaacattatccaagaaggtaaagtaaagaaatttgtaaagcatgttcaacaaattaccttctcaggtaaagtcgcatatgacagtaatcaagaagtttggtatgtaactgaaagagccgtatttaagctagttaaaggcggtattgaattactggaaattgcgccaggcattgatttacaaaaagatattcttgatcaaatggaatttaagccaattattagtgacaatttgcaggagatggatccgagaatttttcaagagccagtcatgaatatcaaaaacgataagaaatagttaagtgttttaattcatagggggatgcaaagttggatattaaccaaatccgttatttgctcacaatagcagataatgactttaacttaactcgtagtgctgaagtcctccatatttctcaacccgctattagtaaagcgattaaagatatggaatttaagcaacaagtaaaaatctttaatcggcgaaagggtaaaatcgttggattgacacgttacggtataactttagttaaggaatctaaaaaagtgtatgaacaatatattgaaatggtttcgaaactaaatgaattatcagaaaatagtaacggaactgttagattaggtattgcaccagttattatatcgaccgtgttcaatgatgcgttaatagcctttattaaccaaaatccaggcattcaactaaaaattatcgagcgtggagcttatgaattacaaaggatgttgattttaggtgatattgatctagctgtgattgtttctccagcgactgttgaaggtatttatgaggatttaatatacgaaaatacagttagggtttggtttaataaagaacatcgttttaatgattttactggtccgattccattctctgaaatagaaaaagaaaagattgttactctgacagatgattttatggttacctttcaattgaacaaaagatttaaaggtgataggctgaaacctaattattttcttcaaacacaatcatgggatttgattttaaatttagttcaacgtgataagaatttaattggtattgtggctgctccaataggaaagaattatagtgatcatgcaataaagaatgctgaaattacacctgaatttccttggaagatatcgatttgtcatactatgaattccactgaagatccaacagtagaatacgctaaaaattggtttttgaaatacttttctaaatataaaaagatatcaattgattaaaaattaaggaagaatcattatgaaagctatatttccaggtagctttgatccaataactaatgttcacttagatatcattagtcgtgcttcaaaattatttgataagttagtcgttgttgtttcaaataatacctccaaaaatggtatgttttctcctcaacaaagatatcaatttgttaaagacgctgtgtctgtttatcctaatgtttccgtgagccttgttcaaagtgatttaactgttaatttggttcatgaattaaatgctgatgttattgttcgtgatgtgagaaataatgaggactttgtttatgaacaacaaatagcattaatgactaagaaaatggaccccaatatagaaactttgattctattttcaaaccctgaatgttcatacatatcttctagtattgtaagagaaattatgctatttggaggcgatatttcagatgctgttcctgcttgtgtaaatcgtgctctaataagaatgaaaaatcaacatatggcaaggagcgtatcattatgaagactagaaaagaaattaccaatttaacgatcacagctgtatttattgcattgctttttatccagacatttgttccgaatgttgggtatgtaagaattcttcctagtcttcctgcaattactactattccattaaccattgctgtttatgggactttaatgggaccgaaatggggattgggttttggattagtttggggaattactcgtttagttgtggcctatacacaaccaggggatatggtcagcttgcttttgttccaaaatccagtaatctctcttgttcctagtgttctagcaggattctttcctggattaattagtcagaagtttaaagatagggatgcacatattcaaaagatagggtatatgctcagtggagcagttgcttcgctgacgaacactattcttgtaattttacttaccgatttaatgtttatgtctaattcaagcaccttaacaagttacttagggcatttttgtcagtcaactccattgttggtaattctagtcactgctctaggtttcaacggcttggtagaagcgatatttaatgcaattcttgtccctataattgttacacctcttaatttggtacttaaaagagcgtaaatgatgaataattttattactgttgaccgtaatcactggactaaattaaactctaagattgagcttccttcttatgaactattaaaaagttttattgatcaaaataagttacaggttacagtcaatgaactttaagaagtatatatcctattagttcaatatatattgatttgcgttcaaaataagaaaatgttctctaaattaaagacaaattacattaagagtgctgatttaaaccagccatttatcctgggaattactggatcagttgctgcaggaaagtcaacgactgctaaagtaatagagactcttattagtcaattttactctgatttagatgttcaatcattgacgactgatggctttatttatcccaacaaagtactggagcaaaagaatttaatgtcacgcaaaggctttcctgaaagttacaatgtatcactattaaatgattttctttctcaagtaagtgatggggtagaggaagtttcctatcctgtatactcacatgagctttcagacatagttcctggtaaatatcgtagcattaccaatccagatattttgattttagaaggaatcgatattttgcaaattcctgaaaatgaagagaagattatcagtgattatatagatctatccatctatattgatgccagtgaaaacttattagaggaatggttcttaactcgctttaaatgtttgctagatattaataaagataatcctaataatttcttttatcattgggctcatattcctttagatgaatcaattgattatgcaaaaaaggtttggcggacagttaatttagttaatctacgtgactatattgtaccaaccaaggaaagggctaatatcattctttataaagatgtaggtcacagagtaacatcaataaaaattcgaaaatattagaagtatctctttctaagcagttcatgagaaatcatggactgcttttggtttaatgtccgtgatctcatcggggtgcaaaacaacatatacgaactagatccacgatagagtataattaggttgaaaacttaaggcagaatagttgtagagtggagggaaaaatgacaaaatatgtggtaaatagtgaattaagcgatactgaatggcaaattgaaaattcaactgccagatatcgctttatagctgacaatggtgataaaactggaggccctgatcctgttgaatatttaactggggcattaaattcttgtatgtctatttcagctggattgcttattaaggcgcaccatctggacgttcaaaattttaagattaatgcggaagcgaataccgagagattatcacacggaatgccagatgttgatacgataactatcaaaatatcatttgatagtcctatgtctcatgaagatcaagataaatttgttaaagatattttaagagtatctactgtctatcaaacgttgaaaaaagcgatcaagattagtattgagtggaattagcctaagttaaaatgactagtacgaaagaagcactgaagctaaagacaaataattctaaatacaatgcagtagtaaggccatactgcaatatcaattaataaagcaaccagtgtagataaaagatctatactggttgcttttgtttgatttaagttagtgacagtatcattaagttaagacattgacaaatttgacgcttttggaaccgaatcattttgattcggttctttttctttttacaataaaataaagagtgagcagaagtctatatctgcttactcttttgtctcttatcaatttttttataaaaagagcgtagttctcatgaaatcccttcacacaaacattttaaaactgatgaatcagattatcgataaaattcaaaattcattattgacaaaacaataaaataagattagcataatattaaaattatttaagaaaggagctacatatcatgttagaatcacaaaattcagcaacagtagaattacgacgccgccaccaaaatgatggtttattttgtgatcctaaattatggtgtgcggcgaattttgtttaaaaataattaattaagttgattactaagcaaggttcacattcctaattgggatgtggacctttttttgttacagaaaagagaaaaaactatgaagtcaattaaattatttggttcaactggtctacttattggtgctgctttaactttagtagcatgtggtcaaagcaatacaaatgcagcaaaaagtgcaaagaaatttcctgaacaaactgtacaaaaaactgcacagaaaggtggcactttaaactacgcaatcgaaacagatacgccttttaaaggtatttttgatagtcaattatcagttgatcaagttgattctgatgtcatgcaatttggtaatgaggggttattcgatactgataattcatatcaaatacgcgtggtgctagttaaatcgttttagttaataaaaaagtccaatcggattagactcaagttgtaagtaaattaaatagaaaagagtctgatctaattgaactacctcaagcttaatcgtttctctcaccatttacaagttagttttagtcgtttaaatgtaatttgtcgttcactatataatctttatgcgcctgataagcttacgcatcgaaaaaacattgatcaaacaaagctttccgacagctccatcttagcgatgctcatttggcaaactgaaattggaattgaatcccaaagaagattctgtaaattttttgttggcttatctcattctcgctttaatcgtcgagccaagatgcttttgcctttaattcgctgcatccgtcaagcttggaatcaagaggtaaaggttgctggagaatttttaattattgacagttttcctgttccagtttgtcagcctgttcgtaattatcgtgttaagatcttccgtgacatagccgatattggctataaagcaaccaagaaagtctattattatggtttcaaggtgcacgcgctagtaagcgatgaaggctatttgcttgactacgcagtcactaaagcatcagtgcatgatgccaaagaaacagtagaattgatgattaatgctcatccaattaaccattatcttttaggcgatgaaggctacttaggaaaagacttagctgccgagttaaaaggtatgggctatgtcctttggacaccatatcgaaaaaacatgaaaggtgctaaaaaacataataatcatcaactgatggcaattagaagaacaattgaaagcgacttttctttgctcagttactataacgctgaaaataaccgagcaaggagcttagctggctttcagcagcggctagaaatagccattttagcttataatatggcatattgcctagaacgatttaactagcaccacgcgtatatcaaattaataataaaggacctgctacttttaaacttgataaaaatgcaaagacaattactattacggtaaaaaaaggtgttaaatggtcggatggtaagcaagttgtagctaaagacttagaatatccatatgaaatgactgccaacaaagcaactaatagtttacggtattcagattctttagaaaatattgttggtatgaaagcttatcacaatggaaaagcaaaaactatttctggtattcaatttcctaatggtgaaaatggcagaaccattgtcattcattttctttcaatgaagcctggtatgttgcaatcaggtaatgattactttattgaaactgctgctccgtatcattatctaaagaatattcctttcagtaaattggtttcatcagatcaaattagaaaaaatcctatcttttttggcccttataaagttagcaaggtagttagaggacaatctgtaacttaggttccaaataaatattactggagaggtacaccaaaattaagcaaaattgttgctcaggtagtttctactaattccgcatcccaagctattaagagtcataagtttgatatagccgatgtggtaaattcacaatggcaagcagttaaagatgcgaaagatacaaaattcattgctaaaattcctcttgcttacagctatctcggcttcaaagtgggtaaatggcaagatggtaagaatgttatgaatcctaattctaagatgaatagcaaatctttacggcaagcaattgcttatgcaatgaatattaatcaagttgaaaagagatacacgcaaggtttgacttttagagtgccaaccttaattcctgaacaatttggtgattactttgataaaaattctaaaggctatccttacaacttaaagaaagcaagtgaattgttagataaggcgggatataagaagaaaggcaaatggagagttcaacctaacggaaaaccattgagcattcatttagcagctatgagtgggtccgccgttcaagaaccaattattcaaaactacatccaacaatggagaaagattggacttcatgtgagtttaactggaaacagattaatggaattcaattctttctatgataagttagaccaagacgataaaaatatagacatgtttattgcttcctggtcattgtctagtgaaccatcacctagaggaatctatagtgaaactagtgcaatgaatgactcaagatttgtgacaaaagagaacaacaaattactcaatgaaattgattcgtctaaggcgtttaatcatgcatatcgggttaaggcctttcataagtggcagcaatatatgaatgatgaagcttatattgtgccaatgactaattcttactccattaaggctgtgaatagcaagctggttaactattcacttaaaccggctgaatcaaattcgatttggtataaggtgggatttgctaaataatctttcttaagaaaaattcccttccagatgattgaaaacgatcaagattttcttttttgagaatcttggtagttttttatgatttgtaattttataaatgattaggcagtttgaagtctatatgtgtatatttaaattgtataaaatctccttaaatgctgatataacaaggattatttaatatagctttttagcctaatgaagataactatggttatatttatataatatattatatattttagagcagaagtaaaaaaattcgaaattgtttattaattatctgaaaattgaaagcaccaaaatcaagctcaagtcctgtcactattgagctttcttagacgtaattagtttttatatgatctgtttcagtgcaatttgtatgaatcgtggcagttggttaataaagtcattgattacttcatctatcttttcaaaactattctgtttaagctcttttaattctgaaattaagtagaccaatgcatctacgaatctaatatcaggtaaggattcgttcattagatagaataaatctccgattgtcttatcatctgtattttgtctttcctgccaggtcaatagatcataagttattgctgtaactgcgatatagccacattggccatcatagctttgaacttgagatttatctaaagcaagatattgcttagacgtcttaaaatatgtttcaatttgccatctacgaccataaagttggatgatttcttcagggctaagctttgtctgagtagtagctaaaaccaaatacttgttcttgtttccacggttggagacaaagacgagctttaataaaaagctatgtccatgatattgagcctcaactatgcttgaataaagataatgtttctttttacggatgtttgaagcagccaaacgatcatacaagtctttaacgctatagcggcgatggcgataaatgtaataaatctttgaactcttcttgatcatgccaagtccatctaaaccgatcttctttaaaatccaaaacattcttggagaagaaaaccaagaatcgaataagacgtatttagcttctactcctaatcgtaaggcttgtctaatcaactctacagttacatcattcatctttctctgagcttgatttctccttttaccagaaattgaacgttcatcagcagtaatgggagcagctccaatcatatttttcttggttttggttgacatcaaggcaaagttaaccggcaagaaggtattgccatcgctccagcctaaagttaaaccacgatatccgttccaatactcatgcttgtcatggtcatagactttagctagcaattcggtctttttagaaaaagaccgagccatcagcgtatcgtcaacgataaaagcaagtcggcgtcttttatcgataaatggttttaagcagccaatgagccgggctgcaatcaagcataatagtttttgccagttgattcttccatcgttaagtacattgcgagcagttctaacggaaaaacgtttgtcatccttagctctgaataaagaaagccgagcaaaatgtactgacatcagccaagagataatcatggttaatgaaacggtggatttacgcttaaaattgacttgtttagttaacttagctagaccaattagattaataaatgaagaaattaaggatttagtatcgttttctgtgtcgatttgttctatactgttcattgcgcaggatctcctttactttttaggtcgacacttaaagtataacgcagagagatcctgcgtttttatttttgataagaaaaagccaagaggcgcggggaaagagcgttaatcttagctttcaagtttcagttaattatatagaaatggttatttaatttgcttaacctaatgctatcgcatttgaaagagctttcaatatcttttaagatgttatctaggtttgttattaaatatttacgcatatagacttctttatttaacctgctaccctattaagtgaagagacttataacgaagtttaagaaaccgactacttcttaaataaatgagtttaaatttaaagcttgaaaataatgaggacttaaaaatttcgagctttcataaataataaataggggattaggaaaatgaaaaagagcattaaacttttatcaacaattagcattgccgttgctttagcaggtggtgcaattactgcagttaacaatcaagaaacttcaaatgttgatgctgcatcaataacattaccctctggttacaccaaggatgccgttatcaaatggaaccaaactggtaaggccagcaaggctttggtaaatgcctcaattaagggtatgaaagaaaataatgatagtgatgctggttcagacaacaccttggttaatgtaactaagttaactgatagtcaaaaagttgaattaagcaactacactttggaattgattaattctgctcgtaatcaacttggcaagcaatcttggacttacaagcgcggtgcattaaattttgctgaccgtgtagctaatcaatattactcaaacaacaagtcttgctgggatcctgatcactatgttactggtattgaacgtgcagccaaggcttcaggtcttaactcacgtgttggtcaagtttacgaagatgaagcaggtttgccaatttcttcagaatttaacaccaactaccgtacaatgtcggctttgaagagccaaatctacttcaacgttaagcagatgctcttcggtggctttgctggctcaagtagccaaatgggcgatgcttctaagtatactgaatgggaacacgctggcgacttgcttggctgccgcactaagcgctacatccaaaactacaagaaattcaataattaatctgacgttgtagtttgaaactaaaaaagtttcctaatccaagagttcaaacggtttagtcacctgtctgggctctttttaatttgcttaagaatattttgaataatatgattaaatttctattatgtgagattttttcaaaatgtggttgactgtaaacaacaaatagtaaagaatacagttaatgaaaagcgaggaagaacttcataagttagtggaaaaggttattgatgattttgctgcttgggatgaagatgagcgctataaggagccagaaaaagaactacgtcagctgttggaagatagtaaggtcttgggctttataatgtacactagattgagtgatattctgggttggcatcatcgtatgttgactgaagccaaggaagagagaaccttaacagctaaggaggaagtattactgaatgacatggatgcagttcatgatttgatggaacgaaccatggatgaagagaatggtaggttgtagaaagcattaaaattacagaaaaataaaaccacattgctcaaaaattgaagtgagtaatgtggttttttacgttgtaattattgtagtagccaatcaataagattgattttttgaatcccgtcgtagttggctgtgggattgatagtatcaagggttagtaaaagtttggaatgaactccaaacaaatgacatttattgctgctttttggagtcaactccaaaaagctgactttatcgttttgatggaattgaataggggcaagggagatattgtaaaagcgagtgtcgagtaaatagtgaactgagacctaaaagttagacacttttaggtctttttctacgtaaagtcaagcataataagaagtttgacttcattttttgtttaaatttcaacttaaacatcttttagtgtcgatttatttttttagttagacacgacaaataagcccagatccatatctgatttttgggcttagcgttataatgtacttgatcaattaattacgactaaagtctttttgattatgtgtggctacgttgtaatcatatggttgatcattgataatcagggcataaatggttctgattagtttatgaattgaagcaatagctatctttttgaaccctttggtttgagaggatagctttttgctttcataataatctgctatatgacacggatttgtcttagctgcattatcaatttgtccaatagctcgataaagcaacttacgtgcgactgcattgccatgtttagtaatacttaaattagagtccatttctcctgactgatatctgcctggatcaattccgataaaagcattgattttattaggattactaaatctgcgtaaatctcctaactctgctaaaactctgacagcagtggtctgtgcaaagcctggaatgctttctaggttttctaaatcatgattaggcaaagacttcgctaacttaaccattcttgcgattaaattttctctttgatcacttaaattaagcaatctgtgtgcataatactgcacttgctcgacttctatgctagagcaagatacaactggataagcttgataagctaattcaattaatttatctgcagtccttagagcgtgtttaaaagcaatcccctttaagctcattaaccagttaataagctgttttttatcttctcttcttactaagtcacaatgaggatatcgcacaactatttgccagtaatttttacctttagcagaagaaaatagattttcaatttcaggaaaagtcgattgtagagcttggtgaagtcgatttttagccattactaagtcagctgttaactggtcatagaagcggctcaaagcattaagctgcttataagtttgagattgaagttgattaattggatgatgatatagtctttgaattaaggctaaatgataagcatcagttttatcagtcttattatgacgtagtcccatatccatttcttttttagctttaagaggattaagaattacataatcatagccatagtcttccagaaaagattgcagtgtacgtgaataaacaccggtagcttcaaaaataatttgcggatgtttagaaaaagcggttaattcatgaagcaattgaataaaaccaggacgattattagtaatggttagttcatttttgctttcaccaattagttcacaaacagtagaagtagacttgcttacatcaattccaaaagtaacttgcataataaaaacctccaaaacttagtagtaaaacgtatttacttaagaaatcagatctaattttctaaactcgacatctagtgtccacattcttcgaagagactattgaaaacttaagtaaaactgccagtttattatgcgacatcaagtgtctaaagacctcagggcatatcgttttactactactttaattctacaaaagaataaaaatagtgaatcaattatcccgtcggataactaattcactatttagcttagaatgtttactatgtctaaatttaataaagaacaaaaaatagaaatttatcataaatggaaagatgaaaatatctcaatcagtcaattggctaaagcgtacagaatgaatctagctaatttagactatatgcttagattaattgatatgcatggaatagaaattttaactactaaaaaccaaagctattccaaagagtttaagcagcgaactattgaacaagcaatctttggcaataaaccatacttacagctgcctttggaactggggtttaaaagtattggcatgcttaacaattggattagagaatataagaaaaacgggtataatgtcattatcaaacagaaaggacgccctgcccgtgaccaaagaaaagcagaaatctcgcaaggaactggagaaagagatccagcagctgaaagaagaaaacttgcgattgcgtattgtgaacgaatacgtaaaaaaactaagtgccttggatcaagaagatcagaagaaatagctagggtgattacggatctaaggcaagaattcaaagttagtttaaattatgtattagctgcgattgcagagcaccctgagctacctataattgccagaagctcatactacaagattatcaaacgacagcccgtcaagcctaaacggtcaaagcttattgctagaatccatgagatttttaatcatcatcaaggccgctatggatatcgcagagtagctttgcagttaatcagagagggctggaaagttacggagaaaaccgttcgctattggatgcataaattaggtcttaaaggcatcaggtgcaataagcgcaaatattcaagctataaaggtactattggcaaaatagctccaaatttaattcatcgtgatttcttcgcagccctgcctaacacaaaatggtatactgatatcactgaatttcatcttaataatgaaaagctttatttatcgcctattctagacggctgcggtggcgatatagtttcttatactatctccaaacatccagatatggatttagtaatgacaatgcttgacaaggcttttgccaaagaaacagctcttaataactgcatttttgatactgatcagggctgtcagtatcaaagccctcgttatcagcgagctttaaaactccatggtattactcaaagcatgtccagaaagagcaactccatggatgatgggctaatggagaacttctttggcctgctcaaaactgaaatgttctatgatcaagaatacaagtatcataatcttcaagaattaactcaagcaatcgaggaatatatcgaatactataacaacgaaaggataaagagcagattaaaaggcttaaccccgaaagagtatcgaagtcaagcctctattaatccaatattttaattgtctactttttacgtctcagtacatttttacattaattactattatttttcttcttaattagttaatttaaaaagttctggtcaaaacctgacacctttgacacttttcctctcaacaccttgatactactagctttatccatcatatctccattgacaccaaaacaattcaaaagctacccaatgcttgatataacaataatctgctagtgtcaacttaaccaacaccagaccgacaccatttgagttaataactgacacttttcaaatttcaagattcggtgtcaacaacggtgtcgcacatcgactaaaatgtgtcagctaaaccgacaccaaattttaacttggctatgtagattctcaaccattcgcactatattaaatgcaagcctgttcaaaaacttttagctttttgaatgaacgtgctgggcctacaacatcaagcttaaatgatgttcagaaacttatggtcaaaaaggatggattgaaatgacggaatatggctatgctagggtgtctacaaagggacaagaactagcagatcaaattaatcaattgcaaactgctgggatcagtgaggattgcattttctccgaaaaatttactggaactacaactgaccgaccacaatttgctaaactaactcaattggcgaaaccgggtgatgtgattacggttaccaagctggatcggttagctagaaatacccgggaagcattaaatgttattgacccactaatgaatcaaggagtgaagatcaatgtacttaacattggcatgttggaaaactcaactgtgggtaaattagttaaaacaattctcttagcagtggcggaaatggaacgggatatgattgtggaccgcacccaataagggaaacgttatgctaagttacaccggtctgattatcatgaaggacgaccccaaagagccattaccccgcactaccaagccgcttatgagtacttgcttactcattcctacaaacagactgcgagtgcttttgatatttcgatttcaactttgcaacggatccgaaagcaggtggagcaaaataatatagcttagttttaaaaaagtatatattattttgcgctggaggatttgaaaaatggtaaaatgttataccccatttatttactggattgatactaccggtctagactggcaaagcgatgaaatcattcacctaaccataacggatttatttggtaacattgtgttctcacatctgtttaaaccagtgaaaattgaaagttgggacccaactcagcagggtttccacacaaaagcacttgccccccccacatattcaatatataataaattacgcgtggtgctagttaagtcgttttagttaataaaaaagtccaatcggattagactcaagttgtaacttaaattaaatagaaaagagtctgatctaattgaactatctcaagcttaatcgtttttctcaccatttacaagttagctttgctcggctaaatgtaatttgtcgttctttgtacaagctttgtgctcctgatgagctgaaataccgtaaaaatattgatcaggttaagctcttagacagttctattttagcaatgcttatttggcaaactgaaattggtatcgaatctcaaagaagattttgtaaattctttgtcggtttgtctcattctcgctttaatcgtcgggcacgaatgcttttgcctttaatgcgctgtatccgtcaagattggaatcaagaagtaaaaacagctggagaattcttaattattgacagcttcccagttccagtttgtcagcccatccgcaactatcgcgtcaagatctttcgtggcatatctgatatcggatataaagccactaagaaaatctattattacggcttcaaggttcacgcgatagtaagtgatgacggctatgtgctttggacaccatatcgaagaaacatgaaaggcgctaaaaagcataacgatcatcaactgatggcaattagaagaacaattgagagcgacttttctttgcttagctactataacgctgaaaataactgggcaaggagcttagctggttttcagcagcggctagaaatagccattttggcttataatatagcatattgcctagaacgatttaactagcaccacgcgtaataaattgcgtcttagaaagaggatataaaatatggacaaattacataagcaacaagtagcaaaacgacaacgatttgccattaagaaattaacagttggaacggcatctgtccttgttggcttaaccttcattattagtggtaatgccaaggcagatacgacagttgctgctcaaaatacattcacgactcaagtgactgatccacaagttagtgcccattcaagcaatattcggattagcgacgaatcaaatacggttgttcatcaaacttcatcaacattagttccaaataaaacaacaacgccagcgcaacaaatgccgataatccataaaacacagcaaaacaaccactgcccagtaagtacaacaaacacagcaaaacaaccactgcccagtaagtacaacattactatgaattttcgcgatgtcaccctacataagccaattcaagtgattagtaatggtcattatgtattcaaacaacctttcaagcagaccacaattcgaccaggggatagtgtggatcaagaatttactgtggccggttataaattaatgaattcagaagttttgaataagtatttctattttgataaacaaggtaatgcctgccttaagaaaggtattactacgcaagacattaacattaatttagattacgcatcattgtcaccaatcaaagtagagtatgttgatgtagataacgggcatattttagcatcaatcgttctagatagtttctggatggcccctgaatctccacaacaccgtgctggtgataagaaagcaccggatgcatcacgctatgaagccgcagccattaatattcctggatataaattagtttctgaacctgttttaaagggtaaaatcactggtcaaactcgaaattcgttagctgatcctaactatgtttatttaactttcaagtataagaaggttataaaaaataattctgatagtaataggactgaattgttacttgttccagaagaaacaaatctaccgtacaaactctttacgattgctggtagctatggcgaaaggattgacctaaacaatggtaattatgagaaaaaaatgagtgaggagattagccattacgaaaaacaaggttactcctatataggaagtacagggacatatcttaattctgattatttcaattggtacgctaaggggatacatgtttacttgctaccaaacaaaccagtaactgtgaggtacattgatgagcaaggaaatgtgcttaggaataatgatacgcttgcgttcaacctagataatcctaaccaaaaaaataatggggttaatccgcaaaaaggctggtatgcaaagggtccatggcaagtccaacctaagaaaattaaaggttatcgtcttgttcgtactcttggagcgacgagtggccagtatactgtataccagtacatcacaacttttgtttacactaaggacacagatccaactgatcccaaaacgccagagacaacaacaacaacaactgatccaaagacaccaagcgataagcttccggacaatcctggcaagtctggtcagacagttccagttaatattcacattcctgatggttatcaattagttcctggtgaaagtgttccaacattttacaccttcaaggatggtaaccctaatcaaatcattagttgttggttgatcccaactaatggcggtcaaccaacaactaatgatcatcaaggacaaggaacaccagctactaatacgcctacaaacactactcctaatggaaatgctgttactggcaaactagaaggtaatgttcctaacatgcaaactgggaagacgattacgtttcaaccaacgacagctaaggataaccaactaccacaaactggtaatgacaatagcttaacaaccgttgccgggattattgtaagcctgttaaccagttgcttagctgttcttggcattaataaacatcaaggctaatatgattacctaccaaccattccgaagctaatcaagacgcgatgctttaattagcttcggaattttgaatgatatatcattataataggatggaataaactttatataaatataagtaatggggattgatttctaatcttttaagaatactgtttatggttgattttttatacaatgtttccaactgagagtaaatataaaaagggagatactatgttatcagcaaagaattattacggccgtctggtaaagttaaaaccaaaacaagatcatttttcacttcgtaagttatctattggtcttatttctgttaccataggtattaccttatacttgggagtggacaactcctatgttatggctgatacgaatttgagggataataacaatcaacaattagccggatcgggtaatggcaccaatataataaatgataaagttaaaattccaaccggtgcttttcagtctaaacaaatgcaaactgaaaattgcaaagtaaataatcagatgttggataaaactgaagtaacaaattctactaaaaattcttctacactaaatgtggaaaattccaagactgctgatttgtcgagatttgattactctttatatacaaaaaaagtaaagagttttgaatttagaaattcagataataacgatgtaattagaacagtaatattaaacaaacctaccggtgttgaaactgtaactatgactttgaatgttagctgcttaaaagggagaaagcatcagcatcgatcgcacacatctactagatcgagtatttataattataaacctcaagttattgctgaagtaaatacatccaataatccattgccaaaaatatcaattttggagaaaaacgttttaccaaaaactttttttcaagtagataagaatacatttcttactcaacaggataaagagaactatgagaaatttatatcagttaataagaatgatattagcatagaattaccagctttttccattaatgatattgatattccaggctattcttatcatattaatgcaaaaaagactactcctggagcaggattaggtaaagaaaagttttacatctacactgaatcaccacaaacagttgttatcgactataccccgattacggttaaggttgaacataagatcatcacggtaacaccaaccgatccgaagacaccaagcgataagcttccagacaatcctggcaagaactatccaaagggtgttgataagaaagatctgaacaagactgttaagcggacgattactgttaataaaccagctggctcaactgttgatgctagtcaagagactactctaactcggacggctactgttgacgaggttacaggccaagttacgtatggcaaatggacaacctcaaagcttgataagtataatgcaccagaaattccaggttacactccaagtcaagcagaagtccctgcagttgatcaggtaacggttgattacacagatccaaaaattgaaattacctacacgccaaccgaacagactgggaagatcacatacgttgatccaaacggcaaagaagttggtactaccccattaacaggaaagacggatgaagagattccagttacaccaaacgttcctgcaggttggcagattgttcctgatccaaagattccaacaaagatcaccgctactccagacggcattcaaacagttacggttaaggttgaacataagatcatcacggtaacaccaaccgatccgaagacaccaagcgataagcttccagacaatcctggcaagaactatccaaagggtgttgataagaaagatctgaacaagactgttaagcggacgattactgttaataaaccagctggctcaactgttgatgctagtcaagagactactctaactcggacggctactgttgacgaggttacaggccaagttacgtatggcaaatggacaacctcaaagcttgataagtataatgcaccagaaattccaggttacactccaagtcaagcagaagtccctgcagttgatcaggtaacggttgattacacagatccaaaaattgaaattacctacacgccaaccgaacagactgggaagatcacatacgttgatccaaacggcaaagaagttggtactaccccattaacaggaaagacggatgaagagattccagttacaccaaacgttcctgcaggttggcagattgttcctgatccaaagattccaacaaagatcaccgctactccagacggcattcaaacagttacggttaaggttgaacataagatcatcacggtaacaccaaccgatccgaagacaccaagcgataagcttccagacaatcctggcaagaactatccaaagggtgttgataagaaagatctgaacaagactgttaagcggacgattacgtctcaaccaacgacagctaaggataaccaactaccacaaactggtaatgacaatagcttaacattaatgggcttaggtgcctccaccttattgggaatgtttggccttgctgctgtaaacaagaagcgtaagtaatcaaattagctctacaattttatccctttgtcagtactgatgaggtattttgatgaggttagtttaagtagcgaagctgcttgagctgaccttttcttttagcttagtttttaccatgagatttgagagctagtagacttcggatacgggaatgatcaaagttgcgaaaaccataagctgttattctagtggtcttaattttattattgtaagcagtcgttatcaatacgggttgaacaaagggactctacaattgtaagtactgatgaatttaacatcagtgcttattttggttttctacgaatagtcaaggatattaaaggaattccttggaatttagctggatagaaaagttaattaaataattaaaatggctcaaagttaaatttaaagtataacaaaacaagctcatgaactagatttattgaacctgtcaaatcttttgtgtaaatagttctttctcgtaaattgatttttgaattatttattcaaaataagattctaaggtatcctgaacctgaccaaagcctttatgaattcggttgaaatagcggtcattgtagctcattgcctggatgccaataaatgcatcaagcgactgttcagttggaaattctgccttaggcttagctttacgcttgatgacgttgttaaaggattcaatcatattggttgaataaattgaagctctgatttgtttgggataattgtagaagaccagcagatcgggctcaatttccttcaaacctttgatgacattgctataagctttattccatctggcatagaatttgtgcaagacagctgcagcttctttttggcttgtctgttgatgtatctgcttgaattcgttcatgatcttttcgcggtcatccacccggactttagcacagatattgcgcatgacatgaaccaggcagcgttgaaaatgagctttaggataagtcctggccaaggctgttttcatgccaacaacaccatcagaaagaaagagttcaacttgcttcaagcctctggacttcatgttttgaagcatctctgtccagacttcaatgttctcactaggagcaatgcagtagtcaatgacttccttatgtccattaggtttaatgccaatggcaatatatactgcttcacgctcaaacgtttctcggcgcaaaggaaggtatgtcgcatccaaatagacacagaaaaacttgtcgcttagcttgcgcttgtgataagcctcaaccttggggagcatctgcttggaaatatttgatacttgagctggactataatgactgccatacattttctcaatcaagtcagcgatttctctggtagttacgcctttggagtagagcttgataatcgtgctttccaaaacatcagagtgctgcttgtagtcaggcagcgtgtgctgatgaaactgaccgttgcggtctcgaggcacttgcacttcaattggtccaaactgggtatcaaccttgcggaaataagcaccatttctagaattgccagtattccagccatttctggcatagggatcatagcctagaaaggcagtcaactcagcttctagcaagttattaacagcctgttgtagctctttgcgcaataaatcatttattttgtctggattgaatagagcttgagcaaaatctttggtaaaatcattcatgaaggagttcttctttctgtatgtgtttttttgttcaaaccaatcatacgagaaaggaactcctttttctaatgtttaaagaaataaatttaaggaatcattcatccttacacaaactattttacagtctctccaaagagtttaagcagcgaactattgaacaagcaatctttggcaataaaccatacttacagctgcctttggaactggggtttaaaagtattggcatgcttaacaattggattagagaatataagaaaaacgggtataatgtcattatcaaacagaaaggacgccctgcccgtgaccaaagaaaagcagaaatctcgcaaggaactggagaaagagatccagcagctgaaagaagaaaacttgcgattgcgtattgtgaacgaatacgtaaaaaaactaagtgccttggatcaagaagatcagaagaaatagctagggtgattacggatctaaggcaagaattcaaagttagtttaaattatgtattagctgcgattgcagagcaccctgagctacctataattgccagaagctcatactacaagattatcaaacgacagcccgtcaagcctaaacggtcaaagcttattgctagaatccatgagatttttaatcatcatcaaggccgctatggatatcgcagagtagctttgcagttaatcagagagggctggaaagttacggagaaaaccgttcgctattggatgcataaattaggtcttaaaggcatcaggtgcaataagcgcaaatattcaagctataaaggtactattggcaaaatagctccaaatttaattcatcgtgatttcttcgcagccctgcctaacacaaaatggtatactgatatcactgaatttcatcttaataatgaaaagctttatttatcgcctattctagacggctgcggtggcgatatagtttcttatactatctccaaacatccagatatggatttagtaatgacaatgcttgacaaggcttttgccaaagaaacagctcttaataactgcatttttgatactgatcagggctgtcagtatcaaagccctcgttatcagcgagctttaaaactccatggtattactcaaagcatgtccagaaagagcaactccatggatgatgggctaatggagaacttctttggcctgctcaaaactgaaatgttctatgatcaagaatacaagtatcataatcttcaagaattaactcaagcaatcgaggaatatatcgaatactataacaacgaaaggataaagagcagattaaaaggcttaaccccgaaagagtatcgaagtcaagcctctattaatccaatattttaattgtctactttttacgtctcagtacagtgctttcgaggcttttcttttatattattttttcttagaaatagagtcacggatatttaattgactatggcaagtgatcgtaagtggaatttgaatatcttccgtaattagatctttagccaaacgaacggcagtcttgcccatttcttcagtattcatatagacactggatagggtaggagttaagaagcgattgatatctacatcatcaaaactaacaacagagatatcgtcagggatgttaacacctgcatcactaaaggctttataaacacctaatgccataggatcactaccgacaacaacagcagtaggacgttgttgcagttttaagatctcttttccagcttcaaaagcagagttagttgaccaatcagtaataaaagaatggcagtactggtcaagattgtggagtttcatccaggacaagtaagtgagttcacgtagatcatttttttcacaagcaatcttaccgtcaagatcaagaaccaatgattttccaccgatgtaaacaatgttcttgtgtcccaggttatagagggtatcaagaatatgagaagtttcttccacaaaatcattacgaacgatattacaattatgaatattggtgttgacgtcgataaaaattatatggggattaatgctttgaatctgcttaattgctacaggtgtcatttcaccctcgattagcactgcgccaaatttagctaagtcagcccaatttttattatcatcttctattctaaaaggttgctcaatacgtaaatgccatttcttggcttcttcattaatgcctttatgcagattgagaaaatagggatcggtgatttcacgagatttgttataacgcatgattagtgcaatcgagagctggttatcagtttgcttgggaccaggatgtttttgagatttcgaataatgcaggcgtttggcggtttcgataacgcaggcacgactagcctcattgattctaaaagttggatcattgtttaaaattcgtgatacgctagctggcgataccccagcaatacgtgcaatgtctctaatacttgccataaagatgctccttgtttgtttactgtttacattatacaacttttagcaagaaactggtgtataccgaacttgaggataatagtttagtgtccataaagtaagtcatgttgaatcaatgttacttactttatggacactaaatttacttattttactacactacatagtaaagtgtagtaaaataagtaaaaaagcaattgaaaaagaagaatatggaaataataaaatcttaataatttgttcgcttgtttttatatttgtaattcattaaacttatgttcgaaataatgaaaggagaaatatatttttcaattgtaggtaatataattccatattcgtatattgacagtacttatgaaacaaaaatcattgattagtcaactagcaaaaatacataacggtacaattactcatcgtgaattagcattaaatggagtatcaagttatagtatttcgaaagctgttcaggatggtacgttagaaaaaatacgtccgggaatttatttatttggtgatgataccgaggatatattttatagtttgcaacaaaaatataaaaaaggaatctattctttagaaacagcattatatttatgggggttaagtgatcaatatccttttagcttagatatgacttttcctaggggctacaataatccaactttggatattgaaataaatccacatattcaaactaaaagtttggctactcagggaataactcaaactgaatcattcaatggaaatgtgattaatctctatactcctgaaagaactctagctgaaatattgcgaccgattaatgctgtagatatcgaaataattaccaatgccttcaagatgtggaataaggaaaagaaaaaagacataaatacattaatgtcttttgcagaaaagtttagggtaactagaaaggtaaatagctacttagaggtgttgttgtgaaaaattatgttgatgagaagcagttcaaagcagatgtaagaaggtatgctagagagcataatataaaaggaaatgagattggtcgattatggcaagaaattatgttagatgatttgctagaaagaatttcagtatcaaaatatcgagataatttcattttaaaaggtggttttttgttgtcggctattgttggtatcgataaaagatccacggaagacattgatgctgagataaaaggattagatttgaccgaaaaacaaatagctaaagtatttgaagaaatctgtcaaataaaattagcgggggatctattaagcatttcgttgtcagaaactgaacagattcatgagcatgaagagtacaagggctatcgattacattttaatgcttcttttcggaagataagatatccattaaaagtagatgtttcaacaggggatgttattacacctagggagattgaatatagctataaattacatttagaagatcgacatattaatatttgggcatatactatggaaactatagtagcggaaaaattagaaacggtaattacgagaggaatagctaatacacgtatgaaagatctctatgatttattcatactgcagagagaacgaatcaatttagctactttaaagtcagcttttgctaatactacgaattaccgtgaatcaatcttttggacaggacaagatatggattataagtattgtctaagacaagtagatattattgctgaaaatagtaatatgcagaatctttggaatagatacgtgagaaaacatccttttgctaagggaatcacttttactcaagttattcaggcagttcaaacttggctaactaaattagagtttgaaaaataatttcaatcaaaaatgacgctaattgatcgaaccagcgtcatttttttagataatagatgtagaaaatagtttgaaaaacgattagtttttatagaaatctttattatactttacttgtcttcgtagccctttgggtgactcttgtgccagttccaagcagttgcgataacgtcatcaacactttcatgctttggcttccagcccaaaatagttcttgctttggttgaatcagcaaccaaagagtcagggtcaccgccacgacgtggacccattgtgtaaggaatatcaatccctgttacttttttagcagcgttcaaaatttcaaggttggagtaaccttgagcagtacccaagttaaagacatctgacttattagtctccatcatatgtttcagtgccaaaatatgagcatcaattaaatcttcaacttgaacgtagtcacgaacgttggtaccgtccttagtgtcatagtcatcacaaaagatagtaaacttaccatccccagaaattgcactcttcaaaatatttggaatcaagtgtgtttctggtgcgtgatcttcacctattgtgccatcacttgcagcaccagcaacgttgaagtagcgaagagcagtgtacttaataccatcagctttgtcagcccaagccatgatcttttccatcatcatcttggtttcaccatatgggttgattggatcaagtggggtgtcttcggtgattggcaatttcttaggaataccataagttgcagcacttgaagagaagactaagtatttaacaccagcgtcattcatagcttgtaataatgaaatcatgccagtaacgttattgtcatagtacttaagtggctttttaactgactctggaactaatgaatatgctgcaaagtgcattacagcatcaatcttttcatcacgtaaaattttgcttaccaaaaaagtatcttcaatatcgccttggtaaaacttagccttaggatctacagcctttctgtgaccagtatataaagcatctaagacaacaacatcattgccttctttaactaattcgcgtacagcgtgtgagccgatataacccgcaccaccgacaactaaaactttcatgttttgcgctcctttattttagttattatcttttattgaaatcgattacattataacacatattttagtaaataatttacttattttagataaattatttaaaaacactaatttagtctaaatgaaaattcatgatcttgacttgggtcgatttgatattgatcttcaacatctgtaccccagctatcgatgccacctacaccgcgaacggcacctgcgattactaaaactgttctccgggcaagaggcaattcttcaatatgcgttgcattttctagttcttctgctgtgtagggaaggcaactgaagttgaatggcttatcagtttgctcaacggtgaggtcaaaatcctcattagaatgatcagcattgttgagcgtagtatttctagtgattttgagtttatgcgtttgcatgtgcatcccattttcctgtggcactaggtatttggttactggcaatcccttaattttaaaagagccagcactggctccagccatccgatcaggataagtctcaccagataagccttcatattcaaagccactagctagagttggtatgataaagcgcattccaattactggaagcggtggtaaatcttttttaccaaaataacgcatcttaattgtaacatgaccattattgttaatttggtaagtaatttcaacttttgtttttggaatagttaaagtttcataaataaaagtaatttcgactttacttgcgtactcatgattagaaaattggttgttgagcggagcgattggcaaatctgcaaaatcatgttgatcaactttgagctgaatttcagtacagtggctaaacatatcggcgccgagccattgagctgcttttaagttgaaaccgttgccgcgatcgttatcagtagttgcacgccaaaaggttggggtaggaacgcgataaaaccattctttacccttaatttttaaagactctaagccacctttttcatagctgaaaatatattgcttatctggggtattaatgcctaaagtagcatccccatagattatatgtaaattatttgtgtaagccatagtagtatttaacctcctgcattgctggttttggtgtacgatcggcgaacattaagccatcgcctgaaaattcataatcagagtgtcggtcgtcaaagtcgccgccataccgtaatacttcttggccactcaccggatcgtgtactaatagcgcttggtcgatgaagtcccaaataaagccgcctaaatattgtgggtattggtcaagcaatttaatgtaggaatccatgccaccatcagaattacccatatcatgcatatattcgcattctaaaaatggcttttgaggcttatttttaagatattcttcaacatcttttggtggtaaatacatccagctttcaagatcagaaatcttgtcctttaattctggcgtatgaaccacgccttcatagtgggtcaggcgactatgatcgtgtgctttataaaatttattcatagccgcaatgttttctccggcatatgattcattgccaagagaccagaagagaatggcggtatggttttttaaagtttcataattgttgcgggcacggtcaattacagcttcacgccattcaggaatagaaccgggaacattatctgaaggttcaacttgtcccatcttttgccaagtaccatgtgattcgagattattttcagccatgacatagattccattttgatcgcagagatagtaccacggaatctgattaggataatggcaagttctaaccgcattgatgttattttctttaaaagcatgtatatcttgtttcatatcagttaaagtgatgctgcggccacgcttcatattccattcatgccgattgaccccattaataattagacgttgaccatttaataaaacaaccttgtcagaattaatttcgatttttctaaagccgaattggtaaggaattagttcaagtaaatcaccattttcagcgtgaacttcaataattagttggtacaaatatgggtcatggttatcccaaagatgcacatttttgaataattctttttcaatttttatggttaagctgattggtgcttttttctcaagtagagttttgccattaatatcttctacgaacaagtgaactgagccagtatttttgcctgtaaagtgcaattgagcattaaagattccatcttggtaattatttgtaacttctggttttaaatcgagatcggttaaatgcgtctcaggtaggccgagcaattcaactgaacgaaaaatgccagaaaaacggaacatatcctggtcttccaagaaagaggcagtgctatgtttgaaaacttcaactgctaaaatattgtttttgtttttaatgtaaggtgttagatcaaattctgaaggagtgaaactatcttcggcgtaaccaacaaaatgaccattgagccaaacatacattgctcgctcaactccttcaaaaacaatgtgaacatcacgacctcgcaaagtggaatttaagtcaaaatgcttaatgtaagagccaactgtgttatctgcacctttgctaaaagagtcggtagctttttggttgattgtgtaagcaggtcgacgataaatttttccttcccacggaaagagcgtattaatatattgattttgagcgtaattatttagctcaatttcacttgggactggaatgtgatcaaatgatgaagaatcgaaatctgttttaaagaaatcaacgggtcgtgtttgtggattagctgaaaacttaaaacaccagtcaccatttaaactttgaacaaaactactagtttgcttttgccattcgcgatagttcttgaaatagggatgatcgctgtgggcaggaacttgattaacgcggaaaacttcggggtcatcaagccagctaagatttgctttcatgaaaatacctgatttctataaaaaaattaaccttgaaaacgcttatattataacacatagataataaatttacttaataagtaaattatttactgaaaaatatttttaagattaatatttttgactcgaaaacgaatgacagagactgtaaaatagtttgtgtaaggatgaatgattccttaaatttatttctttaaacattagaaaaaggagttcctttctcgtatgattggtttgaacaaaaaaacacatacagaaagaagaactccttcatgaatgattttaccaaagattttgctcaagctctattcaatccagacaaaataaatgatttattgcgcaaagagctacaacaggctgttaataacttgttagaagctgaattgaccgcctttctgggctatgatccctatgccagaaatggctggaatactggcaactctagaaatggtgcttatttccgcaaagttgatacgcaatttggcccaattgaagtgcaagtgcctcgggatcgcaacggtcaatttcatcagcacacgctgcctggctacaagcagcactcggatgtcttggaaagcatgattatcaagctttactccaagggcgtgaccaccagggaaatagccgatctaattgaaaagatgtatggcagccattacagtccagctcaggtatcaaatatttccaagcagatgattccaaaggttgaggcttaccacaaacgcaagctaagcgacaagtttttctgcgtctatttggatgcgacataccttcctttgcgccgagaaacatttgagcgtgaagcagtctatattgccattggcatcaagcctaatgggcacaaggaggtcattgactactgcattgcacctagcgagaacattgaagtctggacagatatgcttcaaaacatgaaatcccgaggcttaaagcaagttgagctttttctttctgatggtgttgttggcatgaaaacagccttggccaggacttatcctaaagctcattttcaacgctgtttggttcatgtcatgcgcaatatctgcgctaaagtacgcgtcgacgatcgtgaaaagatcatgaacgaattcaaacaggtgcatcaacagacaaacaaagaagaagccacagctgtcctgcatgacttctataccaaatggggcaaggtttacagccatgttatcagaagcttgaaagacatagaaccagatctgctggtcttttataactatcccaagcagatcagagcttcaatttattcgactaacatgattgaatcatttaacaatgtgatcaagcgcaaagctaagcctaaggcagagtttccaactgaacagtcgcttgatgcttttattggcattcaggcaatgagctacaatgaccgttatttcaatcgaattcataaaggctttggtcaggttcaggacaccttagaatcctactttgattaaataaataattaaaaaatcaatttacgagaaagatctatttacacaaaagatttgacagtttcaatattttggattaatctgtattttgcttataataaaagcaatggtaaatatttatttttagttaatgaaaggcccaaaaaatatgttatctaaaagaaattatcaagaacgtcttcggaagatggccccaaaaaagagcgcttttctattagaaagttttctgttggagcagcgtctgttttaattggatttactttcgtgagtatggctggaagtcacaaagttcaagctgcagatgtagctgataaatctgtagtagttgacactttcaataaagataagagtcaagagctaacagaaaataagactattgcaatgccaaaagcagaaaaaacggctgttagttctgtagtacaaaaaggtgcctctgcaaataaaattgaagcagaaaatactacacaagttgataaaaatacagaaggttctgtaaaggtacaagaaaataaagacgcagtacaacctaagactgttaataatgaaaatgtattaaatgtatcaaaagcacagtctcaatctaatgaagctgtaactaagaatgcagcagaatcaaaagtagcagcactacgtgcttttagagcagcacctcaagctactcaatcacaagatgccaatgatttccaaagcttagttaatgccatgaatgatagtagcattggaactattaatattaccaatgatattactattaccggtaaagttaacggccttactacttctggtataggtgatataaacaagcactacctttatctgcagtctaaaggttcagctcgtgacttaacaattaatggtaatggtcacactatcaactttgccggttacagtattgctttacaaaacgagaactaccacaatgctgctggcccttggaacattactttaaaggatatgacgattgagggtagtaagtatggctattcaccaatttcattctatagcagcaagactaatactgaaaatagtaaattaatttttgatggtgtcactgctaacttgaatgatcgtccattagttgacaagtatggtgaaaacttaccagttcactttgccggtgataacaacattatgcttaataatatgtcaattggttacaatctagtaactggtaagactgtaaaatttgactctggtaatactacttttaatgttggtggtaaagtaactggaaatgctattaatcctgacaactgggtaattcgttcaactgaaaatgctagtaatagtgaaaatccttcaactttaattaatgaaggtgcaactgttactattaatgctaaatcagacgacttacgtggtatttatgctgggcgtcaactaacagctggtcagccaatctatggcgttactgttattaatggtactttgaatgccaacatggcagctggtcactcaactgcaatttggtcacatgatcttgaaattggtaaaaagggtaatgtaactatccataccaagcaaacaaatcaggctgatggtgttgaaaatggtacttctaattcagtaactaattataatggtacccactatgctccaatttcattaggtgttggtccaataagtagtgttgccagtccattatctaagcaaactgccagcttaattaacaatggtagtttgactattatacgtgatactactgaaaagacattggtaccattaatttcaatgggtgacggtggtttaagtactaataccacgttgaaatttttggttggtgccggtgctactctcgatttacaagacaatgcaggtacatttcaatatggtactgaacctagcacaccattgaatggtttgattactctgtggggtacgagtggtacagatttattggaatttcttaccccagcatatgtcaacttacaacgtactggtgatattcgtggtacattgattagaatggaaggtgtctacaacagtactactgttaatggaccaacaccagttgctcaatgggatcaaggtaataagactactattcctaatgatgtttggtatgtaagatacctgatatctgcgaaccaatggggtaataactctggtcaatttatgagtaaaggtcaacatcctaatactgtcgttgcgcagaaaggtgttgatacactttataactctaatgctactgtcttaatgtctaagaaccaaggcgctgataaatacgaaaacggtacaatgccaactgaagtacaacaggcactgcacttgaacagcttcttaaacaactttaacttgtggcgtccacaaagaatggctatgggtagcaagttgaatgatagtcctgacgttaagattgatgattttgataagtatcacccagaagtgcaaacgattgatggaactactcgtcaaacattaagtgatcttgatgctaataagggacttaaagatttaattggtcctgatgaacaaccaatcactgacttcaaggatattgttaagcatgttacttggtacaattctgcaactgataaggatgaatggaacaagatcatgatccagccgactgacagcaaggatccaagtgcccgagttccttatccaaaaccacaaaacccaacaggtaatttaaagactactgatggttttgcttgggctaaggtaacttatgctgatggttcagttgactttgttaagattccacttaaggttactgaaaagaagtatagtgaagaattaactccatcttatcctggtgtttccgttgagcaaggtaagtctgatagcgtagatccaagctttaaggatgaaaacgataaggctgctgatgctccagcgggtactaagtacactgcaggtgaaaatactccagattggattaaagtagatcctgatactggtaaagtaactgtttcaccaactgatgatactagtgtaggttcacatgatatttctgtaacagtaacatacccagatagcagcactgaccaattaactgtaccagtaactgttaccgaaaagagtaacttagctgagaagtatccagttagctacgacaagttaaatgttgaaaaacctagcggcgacacaccagcaactggtgcagtagatccaaaggctgctgcagatatgccagaaggtgcaatcactggttacgaaaaaggtgactttgatgctccagcgggcgtaactatcgatgtaaatcatgatactggtaaggtaactgctagtgtaggtaaaaacgcaacattaggttcatttgaagttccagttaaagtaacttatagtgacggtacttatgctgaagtaaaagttcctgtaagtatcactggtaacaaggttgatccaggtagtggtgacgttgtttactacggtgatcaaagtatggtggtcttcaatggcaaccttactactgttcacaagactactgatagccatgaattaagtgctaaagacagtgccttccaaacaatcacatattactctgattggaacaagaaaggtaacatcgttagcgactataacaagcatgtgatttacaagctaagtgctgatggtactaagtatgtaaacgaagctgatgctacggacagctttgatgctagtgcaattagctttaactggcagaagggttatgaagttaacactggtgttgataactttagcaatggttctgcagacacactttaccaacttgaaaatggtgctgttaactctgaagagcaaactgatgccaatgatccatcaggtttagcaggtaactctaagtatcgttacgactttagtattagtgatactaatgtattgcaaaaactaggtttatcacctgctggttacaatgcttgggctaatgtttactacaacttccttggtgcaactggtaaaattaatattccagtaaactatggcagtgaagtatcaactgatgaagctggtattaagaattacttagcaactaacagtatctcaggtaagacatttgtcaatggtaacccatctggtattaagtgggctgaaaatggtatgccaggtaaagatggcaaatttgctgcttctaacatgactgggattgttgaatttacttttgataacggtactaagttaaatgttcaagtaacatttaagactggatcacatgttcaaacttcaggtagtaaagttaatgacgatactaacctttatgtagaacgtacaattgaatatgatgtaactggaactggtcattcaccaattaactcagtaacacaaaaggttcactatgtacgtgatggataccacaagattaatgctgatggtacagatgctggggaaattatctggaatgaatggaaactggctgatggtcaaactgctgaattcccagaatacagtgttgaccaaatcacaggctatgatgcatatatcaatggtgcaaaggctactcaagttgatgctgccaaagttgctgaaacaaatggcacaccacaaaatggtcaaaacatcacagtaacttacaaaaagcaaaatagtactccagtaccatacaaaccaggtaaagatggcgtaaacgatgccattaacagatatgtaactcgtacaatcatcgttaaggaaccaggtaaagaaccacaaactattactcaaactgttcacttcactaatgaagataaagatggtaatagtggctacaaggatccagtaacaggcgagattaaatacaatactgactggcatgtagcaagtgatttgaaagctaagactggtagctgggaagaatatacagcaccatcagtaacaggttacactccatcacaagctaaggtagaagcaaaaacagtaactgcagaaactgaagctgctagcgtaacaattagctacactaagaatgcagatattccggtaccatacaaaccaggtaaagatggcgtaaacgatgccattaacagatatgtaactcgtacaatcatcgttaaggaaccaggtaaagaaccacaaactattactcaaactgttcacttcactaatgaagataaagatggtaatagtggctacaaggatccagtaacaggaaagacaactataaatccatggactccggctaaacagggactacgtgctgttaatgttgagcaaatcaatggttatgtagctaaagttgatggtaatgtggacgcagtagttgtaactcctgattcagctaatatggtagtaactattacttaccaagctaataaaccagaaggtcaaaacattgctgttaagaaagatacagtaccagatccagcagatggtattaagaataaggatgacttaccagatggtactaagtacacatgggagaagactccagatgtaagtaagccaggtgatgtaccagcaatagtagtagtaacttatccagacggttcaaaggacaaggtagatgttcatattgttgtggataacccaaccccagagccacaagatgttcacactactccaggtgtagtaccagacccatcaacagccatcaagaataaagatgagatgccagatggcactaagtacacatggaaagaagttccagatgttaactctgtaggtgagaagactggtatagtaactgtaaccttaccagatggcacatcagtagatgttaaggttaatgtatttgttgatcctgttaaggaaaataacaatacaattgcagattcaaacaatactaattcttctgataagaatactgcaaatgctgcaacagttaatggtaagtcagaaaacaagaagactttgccacagactggttctaagtcagatgccgctgcaattgccggtttagcagttgccatcgcaggtagcttattaggcttaggtgttaacagaaagaaacgtcaaaagtagaagaactatttataattgatccaaagaaagattaggtgataaacctaatctttttttgtgccttaatttgttatttgatcatgtttaataatttttccgtaagcgtcgtaagcgtcatataaccgagtatcttttttagtccgtatttttcaggtattctaatctcatcaatttaatggaggttaagaatatgatcgaaaaacaacaacccattgtggcacttggccgttcttctaaacctaagaaggctcgtccaccacgcaataatctgttgcttagtttaaagaagaatgacttagagctgaatttttacagcagcttagaccctgaaattatgaataagctgcttgagaaagtcttgccatgattaagctcagtgacttagggcaagtctatatcgtttgcggcaagacggatctgcgtaaaggcattgatggactagcaactttagtcaaagaacagtttgaacttgatccttttagcggcaaagtcttcctcttttgcggcggaagcaaggaccgcttcaaagccctttattgggacggacaaggtttttggctgctctacaaaagatttgaaaatggaaaattgaactggcccaggaatcaaaatgaagttcaagctttatcttctgagcaggtcgactggctaatgaagggcttcgcaatcaatccaaaaataaagaacacgaaagcgtgcgaattctactaacacttgacatcgcacgcttttttgatattcttttaactaataaatttaggaggaagtttaactcatgtcacaagaaaatttggaaaagattattgcacaacaagcaactactattcaaaacttaactgatgaaattaagctcctccgtgaacaagtagcttacttaacgcaaaaacgttatggcaaatcttcagaacaaatgcctttaaatggacaaacaagtctctttgatgaacctgatgctcaagatgacggagaacgtccccgacgccgccgttcagactattacttataaaagacaagctcacaaacgaaagcgtgctgacttactagctgcccttccagctgaagaggttcaccatgaattaggcgacaagcattgtcctgattgtcatcatgaactgattgagataggcaagcagtcagttcgccaagaattattgtttatcccagctcaacttaaaaggttagaccatatccaacatgcttacaaatgtaaatattgcagtcaaagaaatcttagcgacaagatcattaaagctgcagtacctaaagctcccctaaaccatggtctaggttcagcttcactcatcgctcattcactttatcaaaaatatgaaatgaaggtgccggactatcgtcaagaaagcgactggaagaagatgggactagaagtttcaagacagatgttaaattattgggatttgaaaagcagtcaatactactttaaaccagtgtatgatctgcttaagcaaaagctgttaatgcggccaattttacatgccgatgaaacttattatacagtcttagaaagtaaaacaatcaagacttactattgggtcttcctttcaggcaaacatgatcaatacgggattacactctatcatcatgatccttcccggagttgcaaggttgccttaaactttttaggaaactatcccggttatttgcactgtgatatgtggcaggcttatgagcaattgccgaaagcaactttagttggctgctgggctcatgttagaagaaagtttcacgaagccgtaccacaacaggcttctgaaaagtcccttgcccaaaaaggactcaactactgcaatcgcatgttttacttagaacaaacctgggagaatttgagcaaacaagaacgttaccagctaagacaagcaaagctcaagcctctgatgcaagagttcttcaactggtgtgagaaaaataaaatcaccgttttgccaggctctaaattgggaagagccattaattataccctcaagcatcaagctacttttgagcatgtcttgcttgatggcaatttagaattatctaacaataaggctgaacgcgctgtaaaatcactcgtcatgggccgaaagaattggttattttctcaaagttttgagggtgctactgcaagtggctttattctaagcttaattgaaactgccaagagaaatggccttgatcctgaaaagtacttgaattatttgcttcagaaattaccgaatgaagagattctggattcggaaacccttgaagcttatttaccgtggcaagagaagatccagataaattgtaaataaaagaacttaaataaccgtctcagtataacagtaactgggacggtttttaagtacactattttatttgacgcttacaaaatatatagaagaagtagataaacaaatggaggcattaggtgagtttttctttataacaaattattcaggaattaaggttaagtgagtatggaagaagtatttaatgatggtatttacgaatgcatagtagtagcaaccacggtagaaaaatataaggtaacttccaaagttacaattattctacaaattagagatgatattgatgccgttgaattaaaaaaactaatagaatttatgctggatataggttaaaactagaatattggcaaaaaaagatttcgcatactttcaatattaataattttcaatatttgtgttatgcgtgtggccttccgagaccgtaaaatagtttgtgtaaggatgaattattccttaatttaatttcctaaaacattagaaaaaggagttcctttctcgtatgattggtttgaacaaaaaaaacatacagaaagaagaactccttcatgaatgattttaccaaaaatataactcaagctctattcaatcaagataaaattaatgatttgcttcgtcatgaaatccaacaagctgttaatgacatgttagaatctgaactgactgcctttttaggatatgatccctatgctagaaatggctggaatactggtaattctagaaatggtgcgtatttccgtaaaattgatacccagttgggatcaattgaggtacaagtgccacgagatcgcaatggtatgtttcatcaacacactctgccagactataaacaacatactgatctcttagaagatatggttataaagctttattctaaaggtgtaaccactagagaaatagctaatttgatcgaaaaaatgtatggcagtcattatagtccagctcaagtgtctaatatctctaagcaaatgattcctaaagttgaggcttatcaccagcgtaagctgagcgataagttcttttgtgtttatcttgatgcaacgtatataccgttgcgtcgagaaacttttgaacgagaagcagtatatattgccattggcatcaagcctaatggtcacaaggaagttatcgactactgcattgcgcctagtgagaatattgaagtctggacggagttgctccagaacatgaaatctcgtggtttaaagcaagtagagctttccctttcagatggcgttgtcggcatgaaagcagcactggcaaagacctatcctcaagctcatttccaacgctgcttggtccatgttatgcgcaacatctgcgctaaagtacgcgtggacgatcgcgaggcaatcatgaacgaattcaagcagattcaccagcaagccaataaagcggctgctgttgatgtattgcatgctttttatgccaaatggaacaagagctacaatcgtgtcattagaaacctgaaagacatcgagccagacctgcttgttttttataattatcctaagcagatcagggcttcaatttactctaccaacatgatcgaatcctttaataacgtcattaagcgcaaggctaagcctaaagcggagttcccgactgaacagtcgcttgatacttttattggcatccaagcaatgagctacaatgaccgctacttcaaccgaattcacaaaggctttggtcaagtccaggataccttagaatcctattttgaataaataaaacattaaaaaaacaatttacgagaaagatctatttacacaaaagatttgacagtttcgaatgacaaagtgcttatgatatttattggaattacgtaaatattttgtataataaagttaaaaattatttatttaagatagaaaagatataaatatgacaacaattaaagaaatagcacaagaatcagggtattcttcagctacggtttcgcgcttattaaataatgatcctaatttgtcaattacggctgatactaagaacaagattttagaaattgccaataaattgggctattggaaggatcatcaggagaagaagattcgtccaacaattgcgttactataccgagtaaatcatgaagagcaactgcaagatgaatattttacttcattaaagcaagcgctgatttcaacagtagaagcagagtcgctgcagatgaagactttttatgatgcagatgatttgattaaacatgcatcactttttcagggctttatcggagttggcgcggcgccaattgaaaatgcaacactaaaaaaactctatgaggttttgcctaatggggtctttgtcgatactaatccagcgcctgaattatttgattccattcgcccaaatttaacgctgacaataaaaaatgcaattgatctttttctcgataaaggatatcagcgcattggttttataggtggcgttgggcctaagcatgatcatattcaagaagtagatgtacgtgccaccgcttttgcggagtatatcaaggtgagaggcaaaagtgatgaattgatgtttgttaatggcccgtttagcgttgctaatggctataagttgggaaaagaggtactggctaaatgcaaaaataaattgcctgatgcatttttaattgcttcggatactttggcagttggagttttgcaagcttttaatgagaacaatgttaatgtgccaaaagatactgcaattttaagtattaataatagtaatgtggttaagtatgtttcaccgccactttcttcttataatattgatcaacaagagatgattgatatggcattaaatatgctaacgaatctgattattcaacctaatcgggcacacattgatgtaaatatgaatactaatttagttgtgcgcaagagttttgtgcctaagaagtaaattaattagtaaataaaaatattttttagtaatactatcaaaagagaatgctaatttaatgcgttctctttttgtttagctttaagtaaataatttattaaatataaataaattctttacttaacaaaaatagagaatatactaaactatgtaaacgattacaattaatgattgctttagggggcaaatttatgacacacagtgacaagtcagggaagcagattctttcctacgcatcattctgtttgggtaacttaggtcactcggctttttatggtgtgatgagtacatattttattatttttatcactagcagcatgttcagtggacttaatcagtccgttgcagataagctgatcggcttaattacaggattgatggttgtaattagaattgctgaattggtaattgatcctattctaggaaatatagttgataatactaaaactagatggggcaaattcaaaccttggattttaattggtactttagtaagtgccgccttattattagttttgtttactggcatttttggattagcacaaaaaagttggattctctttgcgattttatttgtactaatttatatcagttttgatgtattttattcattatctgatgtttcttattggggcatggtaccagctttaagtgaagattcacatgcacgtggtatttatacttctttaggtgccttttcaggaactattggttggaacggattaacaattattgttgttccattagttacagctgtaacttatgcggtaactggtaaacatgaggaaggtgcgccaggttggttagcatttgcggcagtaatttcagcgttagcaattatatgtgccttgattgtttgttttggtactaaagaaaagcacaatattattagaaactcagctaagcaaaagactactttacgtcaagtattcggtgctattttccataacgatcagattttatggccaagtttagcatacttgctttactcattagcatatgtaattaccaatggtgttttgttctatatgtataaattcgttattggtaaaccaaatgacttctgggtagttggtgttattgcaacaattatcggtttctgtattagtccaatgtttccgattttgaacaaatacattccaagaaaatggttattcatcgctggacaaacttgcatggttttagcttatgttttgtttattttcggcagagacaacgtatttttgatggacttgggcttggttcttttaaacattaactttgctcaattggtaactgttttaacattaactgacgcaattgaatatggacaacttaagaatggtcaaagaaatgaagctgttgttttagctgttcggccgatgattgataagtttgccggtgcggtttctaatgctttagttggttatgttgcaattgctgctgggatgaccggttctgcaactgctgcagacatgactgctcatgatattagcacctttaatatgatggcattatatatcccacttgctttggcagtcttatcaatcgtagtctttttgactaaggtaactttatctgaaaagaaacatgccgaagtggttgaagaattaaaagatcaacttgcagaaggtaagattgaaaagaatgaatctaatactcaagttagacctcaagatcagactatctatgctcctgcagacggtaagttaatgaagatggcagaagtaattgacgaagatggtaagccattcccaggaaagggttttgcaattaaaccagattcaggcaatatttatgctccatttgatggtgtagttaggttcacttttggtactaagcatgcttttgaaattgtttcaaataatggtttacaagtagttgttcatgtcggcttaggtacagttaacttgcgcggtgaaggttttgaaacttattatgatgatggtcaaaaggtaaaaaaaggtgacttgctgttagagtttgatcgtaatttagctcttaagaatggctatcaggacactgtagttaccttctatacacaaccaggacgaattgtaaaatctagtgaaattgaagctggtaagattgttgagcatggtgaaaaagtattagatgtacaatttaagtagaggaattacaatgacacagttaaaacgttttttatatggtggggactataacccagatcaatggccagaagacacttggtcagaagatattaaagtttttaaaaaagcggatttaaattctgctacaattaatgttttttcttggagtttgcttgagtcaagagaaggccaatatgatttttcaaaattagatagaattattcaagaattgtctgatgcaaattttgatattgtacttgctacttctactgctgcgatgccagcttggatgtttaaaaaataccctgacgtagcgcgagttgattatcaaggacggcggcatgtctttggcgcacgacataacttttgccccaatagtaagaattatcaagttttagctagtaaattagtcgagaaaattgccgaaagatatagtaataaccctcatattgctgttgggcatgtgaataatgaatatggcggcaattgctactgtgaaaattgtcaaaatgcttttcgtacttggctcaagagtaaatatcaaacactagataacctgaatgaggcctggaatatgaatgtgtggagccatactattcatgattgggatcagattgttgttcctaatgagttaggagacgcctggggaccagaaggtagcgaaaccattgttgccggtttatcaattgattatttacgttttcaatctgatagtttacaaaatctttttcagatggaaaaatcaattattaaaaagtatgatcctaacactcctgtaactactaatttccatggtttaccaaataagatggttgattatcaaaaatgggctaaagatcaagatattatttcttatgattcttacccaacctacgatgcacctaagtatttaccagcatttttgtatgacttaatgcgtagtttaaagcatcagccatttatgttaatggaatctgcaccgtctcaagtcaattggcaaccatatagcccgctgaaaagaccagggcagatggcagccacggaattgcaagcagttgctcatggtgcagatacggttcagtttttccaattaaaacaagcagtaggcggctcagaaaagttccatagtgccgtaattgcccactcacaaagaaccgacacgagggtctttcatgaactagaagatttgggtaaaaaattaaaaaagattggcccaactgttttaggctctaaaactaaggctagagctgctattgtatttgattgggataacttctggtcatatgagtacgttgacggtattagtcaagattttaattatatggaatcaatcttagattattattgtcaattttatgaacgcaatattccgacagatgtaattagtgtcgatgatgattttagtcaatatgatttagtagttgctcctgttttatacatggttaaagcagggctaagcgaaaaaattaatgcttatgtcaaaaatggtggcaactttgtcactacctatatgtctggaatggttaacaatagtgataatgtctatcttggtggctatcctggcccgttaaaagacgttatgggtatttgggttgaagaaagtgatgcaattgtaccaggacataagacaactgtttcaataaatggcaaggattatgaagcgggtttggtttgtgacttgattcatccagaaaatgcaaaagttttagcaaagtattctaatgagttttatgcagggacggctgcagtcacggaaaataaatatggtcaaggtaaggcttggtatgttggtactaagttgggtcacactgggttgatgcagctattcaaccatattgttttgacagctaacgttgaatcattggtgggcgacagtcataagttagaagttactaagcgagttactcagtctgggcaagaattatactttgttttaaatatgagtaatgaagaaagaaaattgccacaaaaatttgtaaagtataaaaatattttaactggtcagcaagctcatgatcaaatggaaactgtcaaatcttttgtgtaaatagatctttctcgtaaattgattttttaattatttatttaatcaaagtaggattctaaggtgtcctgaacctgaccaaagcctttatgaattcgattgaaataacggtcattgtagctcattgcctgaatgccaataaaagcatcaagcgactgttcagttggaaactctgccttaggcttagctttgcgcttgatcacattgttaaatgattcaatcatgttagtcgaataaattgaagctctgatctgcttgggatagttataaaagaccagcagatctggttctatgtctttcaagcttctgataacatggctgtaaaccttgccccatttggtatagaagtcatgcaggacagctgtggcttcttctttgtttgtctgttgatgcacctgtttgaattcgttcatgatcttttcacgatcgtcgacgcgtactttagcgcagatattgcgcatgacatgaaccaaacagcgttgaaaatgagctttaggataagtcctggccaaggctgttttcatgccaacaacaccatcagaaagaaaaagctcaacttgctttaagcctcgggatttcatgttttgaagcatatctgtccagacttcaatgttctcgctaggtgcaatgcagtagtcaatgacctccttgtgcccattaggcttgatgccaatggcaatatagactgcttcacgctcaaatgtttctcggcgcaaaggaaggtatgtcgcatccaaatagacgcagaaaaacttgtcgcttagcttgcgtttgtggtaagcctcaacctttggaatcatctgcttggaaatatttgatacctgagctggactgtaatggctgccatacatcttttcaattagatcggctatttccctggtggtcacgcccttggagtaaagcttgataatcatgctttccaagacatccgagtgctgcttgtagccaggcagcgtgtgctgatgaaattgaccgttgcgatcccgaggcacttgcacttcaattgggccaaattgcgtatcaactttgcggaaataagcaccatttctagagttgccagtattccagccatttctggcatagggatcatagcccagaaaggcggtcaattcagcttctaacaagttattaacagcctgttgtagctctttgcgcaataaatcatttattttgtctggattgaatagagcttgagcaaaatctttggtaaaatcattcatgaaggagttcttctttctgtatgtgtttttttgttcaaaccaatcatacgagaaaggaactcctttttctaatgtttaaagaaataaatttaaggaatcattcatccttacacaaactattttacagtctcatcaaatgaaggcatgggatgtacaaatacttgttaaataaatgattttttccttaatgaagacaagaagttagacaaacgatctagcttcttgttttttacttaaataaatattttatttatttaagtaaactatttactaaaagatactgaagagatatactaatacttgaaaacgattacagaataaatttgaggtaaaaacaatgaataaggaagaattacttaaagaatatgagacaacttttggtgaaaaaggtaaggatgtctttttctcacctggtcgaatcaacgtgatcggtgaacacactgactacaatggtggtcatgttttcccagctgcaattagtttgggtgtttatggtgtttacggcccaagagaggataaaaaagtttgcttgttttatggcaatgttgatggcgatatcgtggaattcgatattgacgacacaactgttgagaaagatgatcgcttttgggctaactacttcaagggcatgattacgtacttacgtgaaaaatatgacaacattgatcatggttttaatctttatatcaaagccaatttaccatcaggttcagggctatcatcaagtgctgccattgaaatgctaatgggcatcattttaaaggatgaatttaacttagatgttgatcggattgctttagccaagatgggtcaaagaacagagaatgaatttgttggcttgaattcagggattatggatcaatttgcctgcattatgggtaaaaaagatagtgctatcttcctcgattgcaatacattagattatgagtataagccactcgctttaggcgattacgaaattattattatggcaactaacaagccacataccttagccgattctgcttataatgatcgtgttcgtgaatgtcatgatgcagtgaagaagttgcaggctaagttagatattaagactttaggtgagcttgataatgatacttttgatgaatatgcatatctgattaataatgaaactgaaattaagcgtgctcgtcatgctgttagtgaaaaccaaagaactttgcgggcaacaaaggccatgcaagatggagatttggaaaaattgggacgtttgattgatgcttcacacgtttcacttcattacgattatgaagtaactggtcaagaactagatactttagctgaagcttcatgggctcaacctggcgtcttgggtgcaagaatgattggcggtggcttcggtggtagtgccattgcaatcgtcaagaaagaccaagctgaggcatttaagaaaaatgttggcaagatttaccgcgacaagatcggttacgatgccagcttctatgatgcggaaattgttgatggaactaagagaatttaatcaaacaagaggataagtatgaaagttattgaaaaatttgcggatgaagttattaatagtggagcgtatgagccgctcgatcgcgtatatgtgattaacaaaattcgcgctttagttggcgatgaggcaagtagcgttgaagctaatgatgaacaaacttcagttaagcaattagttgatttagccgtgcaaaataaaaagatttcggatgatgttacttcacgtgaagttttgaatgatcaactatacgacttgataacgccaacaccatctaaaactaatggcatcttttggcaaaaaatgcaaaaatcacctgaaaaagcaacagattggttttataaactttgcgaaaacaacaattatgtcaaaaaggaagcaattgccaaaaatgttgtattctcagggaccagctctaaaggacatggcttagaaattacaattaatttgtctaaaccggaaaaggatcctaaggcaattgcggcagcagctcatgcaactggtaagaaatatcctcaatgtgcactttgcctagaaaacgagggttaccttggtggatatggcaaaaatgctcgttcaaatttgagaattattcgcatgaatattggtggccgcccttggggatttcagtattcaccatatgcttacttcaatgaacattgtattttcttagatcaaaagcatattccaatggtcatcaaccaacaaactttgattaatttggttgaaattgaaaagacgttaccacattattttgttggttcaaatgctgacttgccaattgttggtgggtcaatgttagcacatgaacactatcaaggcggacgtcatacttttccaatgatgaaagctaagattaagaaaaatgtagtctttgatgattatcctgaagtggttgctggcattgtcgattggccaatgagcgacttgcgcttgattagcgataattcgttagatttgattgaattgggcgctaaaattattaatttctgggatcattattcagattctgctcgtcaaattaaggcttttgatggtaaaacacgtcatcatactgtgactccaattatgcaccgtgaaggcaagaacttcgtacttgatctagttttgcgtgacaacaacactagtgaaaattatccgttaggtattttccacccacataaagaattgtggcatattaaaaaggaaaatattggcttgatcgaagtaatgggccgtgctattttgccaggtcggttaaagagtgaacttgaagaagttaaaaaatactggttgggccaagataataagatggctattagccacaaagaatgggccgatcaaattaaagcagagcagaatattactgccgagaatgttgacgctgtgatgcagcaagctttagttgaagtctttgaacaagtattgcaagatgccggtgttttcaagaataatgcagatggcgatgaaggctgggataagttcattaccgctttaactaggcagatttaactcatcaatgtgtaaaacgagatctgttggatctcgttttttttgttagcggtaactcatatattctgatggttaaataatttataatatttatgaaagcgaatacaaaagaagggcaagagtatgaagacaagttttagaaaatatggcagaaaagataataaagatctttgtgaaatcacactagagaatgatcacggtatggtagttaaggtattgaactatggtgctacattggaaaaggtgttgcttgatggtgagaatatgattttgtcactggataagccagaagattacgacaaggagcgtaattatctaggcggtacggttggacgtattgccggaagagtgagacgaggtttatggcggcacggcttagaattacatcaattaccaatcaatgaagggcctaaccacattcatggtggtattgggactgatactgaaatttggaattttagacctagttgtaatgaaaaaggtgctcgtgttgatttaacactttttgatccagatgggtataatgattatcctggtaatttaaaattacacgctcgttatgagttagataataacaatattctgcattattcattgggtgccatgagtgataagctgactatttttaatccggttaaccatactttcttcacattaggtgaaaagaaaatgattaatgacttgcaactgcaaatgaatgctgattattatattccagttgatgagactggcttgcctgatcgtggtatggaaaaagctgatggaacagcattcgattttagaaagaagaagcgagttggggatgcattggaagctgatgatccgcaaattaagaaccgcgatggaatggatcatccatttatcttggatggcaatatgccaaatgcagtgctaacttctgctaaacacaagttaacggtaacgactaatgcgccatctctgattctgtacactggtaatggctttgaccacactggcaagtatacagctgactttggtccgtattgcgggattacttttgaagcacaagtgccgccagcagaaggtgatgatttgggacgcatcacgcttttgccaggtgaaaaatttaagcggactgttgattggaaatttgaataaaaatatggagaacatccttactgaatgaattggtagggatgtttcgagactgtaaaatagtttgtgtaaggatgaatgattccttaaatttatttctttaaacattagaaaaaggggttcctttctcgtatgattggtttgaacaaaaaaacacatacagaaagaagaactccttcatgaatgattttaccaaagattttgctcaagctctattcaatccagacaaaataaatgatttattgcgcaaagagctacaacaggctgttaataacttgttagaagctgaattgaccgcctttctgggctatgatccctatgccagaaatggctggaatactggcaactctagaaatggtgcttatttccgcaaagttgatacgcaatttggcccaattgaagtgcaagtgccccgggatcgcaacggtcaatttcatcagcacacgctgcctggctacaagcagcactcggatatcttggaaagcatgattatcaagctttactccaagggcgtgaccaccagggaaatagccgatctaattgaaaagatgtatggcagccattacagtccagctcaggtatcaaatatttccaagcagatgattccaaaggttgaggcttaccacaaacgcaagctaagcgacaagtttttctgcgtctatttggatgcgacataccttcctttgcgccgagaaacatttgagcgtgaagcagtctatattgccattggcatcaagcctaatgggcacaaggaggtcattgactactgcattgcacctagcgagaacattgaagtctggacagatatgcttcaaaacatgaaatcccgaggcttaaagcaagttgagctttttctttctgatggtgttgttggcatgaaaacagccttggccaggacttatcctaaagctcattttcaacgctgtttggttcatgtcatgcgcaatatctgcgctaaagtacgcgtcgacgatcgtgaaaagatcatgaacgaattcaaacaggtgcatcaacagacaaacaaagaagaagccacagctgtcctgcatgacttctataccaaatggggcaaggtttacagccatgttatcagaagcttgaaagacatagaaccagatctgctggtcttttataactatcccaagcagatcagagcttcaatttattcgactaacatgattgaatcatttaacaatgtgatcaagcgcaaagctaagcctaaggcagagtttccaactgaacagtcgcttgatgcttttattggtattcaggcaatgagctacaatgaccgttatttcaatcgaattcataaaggctttggtcaggttcaggacaccttagaatcctactttgattaaataaataattaaaaaatcaatttacgagaaagatctatttacacaaaagatttgacagtttcgatgtttccttctttggatattatgatttgattttacaagtaaatccatattaatatttaaaatatttagaaatcaactgaaaggtatagtaaaaatgatgacaaacgaaaagattattgctttagtcaaggaagaatatctaaacaagattccaaaaatttttcgcaagcatgctgttgaaggcacttgcaagttaatcgctagagaacatcccgatttatacaaggcttttgaagatggtgaaccaaccgcagaagaaaaacaacaaatgacagagttgattaacgggattttcgaacagagaatgaaaaagcataagatgttataaaaagacgctggaatgtaatgattattagatcgctacattctagcgtttttttgattttaattttgatttattaaactaacaggtagcgtataaacactttctaatgaaacagagggatcattaatttgacgtaaaagtaaatcgcacattaattcagcaatttcttttgtatgttgccgagcactaattaaatttggaaaaagactttgaatcaaatgactaccatcaaatcctgtgattaaaggtacttttcctaaataatcagcacattctttagctagtaaagctgtaatgtcatcggtacaacaaattgcatcatattcgtcatcctttaaaaattgaaggatggctatttttttagcaataattgagtcactggcactgagtgagcgaagatcgaatttagaatcaaaagtgttaaatacgcgaatcattcctttgattcgatcacttattgggtaatagtcttctttagcaccagcaataataataattttctttttcttttgttttagaacagattgtgcgatttgcatacctgcgtcatagttattagattgaacagttggtatttgaggactaagtttacggtcaaagctaacaataggaaactttatttttagtccttttttaggaatcttaataggagagctggtgatcagtccagcgatttccttttgtttaaatcgctctaaatagtaattaatatcttgggattgatagtgatctagatgaagaatacaatcgtatcctttttcctgtaaataaaaggctagatattcaaataattcagaataaaaaggattattaatttttggaaaatcaacctcaattaaatttaatttagatgtagtattgactgtattttttgttttgtagcctaatttttttattgcttctttaaccttaagagcagattcaatacctacatatccattttgattaatatatcttgaaactgttgctatcgaaacgtttgcttctttagctatatctttaatagtaactaccatattttttcacttccttatgtaaatattacacatttaaaatcctatatcatagtattttgatttatttaaatgtgtaaatttgtgtaaatccattgaaaactgtaaatagaagtgtatgatgtaattgtaaatatgatagcgcttacttaaagagagcgatatttgatcaagaggagtgaagatttatgaaaaagtggctaaaaagaatagctttaattagcttagtcgctacgatggctttaagtttgacagcttgtggtcaaaataaaagcagcaattctggtaaaaaagtgacaattgagtactttaaccagaaaaaagaaatgtcagcaactttgaaagaaattatcaaagactttgaaaagaaaaatcctgatattcatgtcaaagaagttgacgttcctaatgcaggtacggttttgaagacaagaatgctttcaggagatgttcctgatgtaattaatatttacccacaaaatattgattttcaggaatgggcaaaagcaggttattttgaagatatgactcatgcttcatatattaaaaacattaaaaatcactatgctgattcttttaaaattaacggtaagatttacaacgcaccacttagtgccaacgtttacggtttcttctataatgcaactgaatttaagagattaggaattaaagctcctaagacttgggccgaatttgaacaaattgttaaaaaaatcaaggctagtggcaaggcaccatttgctgtagctggtactgagccttggactttaaacggatatcaccagttatctttagctactgttacaggtggtgctaagcaagctaaccaattacttaggttctcagcgcctaacggcattaaagtaaacaatccttatgttcaaaaagattttactagattgaacttacttcgtgaaaatacacaacaaaattggcgtggtgctagttacaagaaactgtcaaatcttttgtgtaaatagttctttctcgtaaattgattttttaattatttatttaatcaaagtaggattctaaggtgtcctgaacctgaccaaagcctttatgaattcgattgaaataacggtcattgtagctcattgcctgaataccaataaaagcatcaagcgactgttcagttggaaactctgccttaggcttagctttgcgcttgatcacattgttaaatgattcaatcatgttagtcgaataaattgaagctctgatctgcttgggatagttataaaagaccagcagatctggttctatgtctttcaagcttctgataacatggctgtaaaccttgccccatttggtatagaagtcatgcaggacagctgtggcttcttctttgtttgtctgttgatgcacctgtttgaattcgttcatgatcttttcacgatcgtcgacgcgtactttagcgcagatattgcgcatgacatgaaccaaacagcgttgaaaatgagctttaggataagtcctggccaaggctgttttcatgccaacaacaccatcagaaagaaaaagctcaacttgctttaagcctcgggatttcatgttttgaagcatatctgtccagacttcaatgttctcgctaggtgcaatgcagtagtcaatgacctccttgtgcccattaggcttgatgccaatggcaatatagactgcttcacgctcaaatgtttctcggcgcaaaggaaggtatgtcgcatccaaatagacgcagaaaaacttgtcgcttagcttgcgtttgtggtaagcctcaacctttggaatcatctgcttggaaatatttgatacctgagctggactgtaatggctgccatacatcttttcaattagatcggctatttccctggtggtcacgcccttggagtaaagcttgataatcatgctttccaagatatccgagtgctgcttgtagccaggcagcgtgtgctgatgaaattgaccgttgcgatcccggggcacttgcacttcaattgggccaaattgcgtatcaactttgcggaaataagcaccatttctagagttgccagtattccagccatttctggcatagggatcatagcccagaaaggcggtcaattcagcttctaacaagttattaacagcctgttgtagctctttgcgcaataaatcatttattttgtctggattgaatagagcttgagcaaaatctttggtaaaatcattcatgaaggagttcttctttctgtatgtgtttttttgttcaaaccaatcatacgagaaaggaacccctttttctaatgtttaaagaaataaatttaaggaatcattcatccttacacaaactattttacagtctccaactttagataaattacttgatcaaatgatgacgcaatttgagcagttaaataaaaattatgaaaaaggacatggagaacgtctctatgaacatttacgtggtcgggtaaaaagtgaagccagtatggaaggcaagtgcaaaagaaaagatttaccgttaacgccacaatcagctttgcgtgctaatcgagatagtgttggattgcgtgttgtctgcaattttattgacgatatttatacctgtattgactttattaagcagtgggataatgttaatgtttatcaggaaaaagattatattactaatgctaaaactaatgggtatcgttcatatcatatgatttttgacgtgactgtacctgatgaagatgttgacggcaatataccgggtcattattttgttgaagtgcagctaagaactatcgccatggatacttgggcaagtctagaacatgaaatgaaatacaagcacaagattaagaatcctgagatgattggcgaagaattaaaaagagtagcagatgaattagcttcttgtgatgtatcaatgcagacgattcgacaattaattagggaagaggattagtaaattaatgaaaattttagtagcagaagatgaaccacagctattgcgtgttttaaccgttgccatggaacatgctggttatgatgttgatccagtggacaatggactaaaggcagtagaacatgctaaagaaaattcttatgacgtaattatgttagatatcatgatgccagtcatggatggaattactgctttgaaaaagatccgtgagagtggcgacaagacttatattttaatgttgaccgctaaggccgaggttgatgaccgagtaactgggcttgatagtggtgctgatgattatttgactaagccgttttcacttaaggaattgctagcacggctgcgttcaaaagaacgtcgagaagatgattttacacctaataaattggaattaggggatgtaactttaaatgtatctaagcaagagttagttagtcataactcaattcgtttgagcggaactgagactcagttgatgaattattttttattaaatcaaaataaggaattatcaacggaagaattgcttaatcatgtttggaaaaatgatattgatgcaaacgctgatgtagtttggatttatatttcatacttgcgacaaaaactgcaatcaattcaaagttcagttcgaattgaaggcgataagggtgactcgtataagttagttaagtaggtgagcagatgattcaaaaatttcgttggaagtttattggtacttctgttgctgccttatttgtagtcctattgttgaccttaggcggcttagtttgggtgactcatgttcaaagtcaaaatgaagtagatcgggtgctgacagctttagttaaaaatgaaggacgtttatcacctaaaaatgccaagccagcttttggtgaccaacgcgatccaattaatcgcaattttttaggtgggcaatataatcctgaagcggtttatcagtatcgctattttgcagtaatgattgatgaaagtcatcgcgtacatgtgatcaacgataataatgtttacaaggttaataattctaagattcagaatattaccagagcagctttagaaaatggagacaaaagcggtgtagtcgccctagggcaaaatcaatatgccttcagagttgctaaaaattctactggtgaaacgatgattgtctttttaaatgagaccctaatttttaatcgtttttggttattattcagggtagctttagttttaggattaggagctttgattgtcttcgctttagttttgattttagttttaggtaaagcaatcaagcctactgttgatgcttatcataagcagcaggagtttattactaatgctggtcatgaattaaaaacaccattaagcgaatacagaaatggaagagatgcttggcaataattctgaatggaatgaaagcaataaagagcaagtagcaaaattaaccaaattaattaatcgtttgatttcgttagctcgtaccggcgagatgggtgaacttaccttaagtaaaattgatttttcaaaaattgttgaagaaacgactaaagattttaaatcagtcatgaagaagaatgacttagtttatcaagtatcggtgcgtgaagggctgaatgttttagctgaaaaacatactttagctgagatagttaacatcctattggacaatgcccagaaatattgtgatcctcatggcaagattcaggtaaaattgactaaaggtggtaccttaagtaaatatgcagttttgcgggtagaaaatacttatcgtgaaggtaaaggcaaagactatagtcatttctttgatcgcttttatcgtgatgataagtcacataattctaagaaaggtggctttggcattggtctaaccatggcacaagaattagtggaagcttttcatggtaaaatttcggcccaccataaaggtgaagacattgtttttactgttagtttaaaaattgctaaatgattattctgtgatagttgtataattagaacagaattgggggatcattttggcgaagagaaaatcaatttataccaaagatgttgtcctggttatggcagcatctttcttttttatgtttagtacaatgtttgttaatcctttgattaatggatatgctaaagaattaggcgctagcagtgcttttgctggaatcattgtcgggattatgagtttagcagcaatgtttttgcgaccggtagctggcaatttaaccgataaattttctaaataccgcttatcgtttattggcggcgctttaatttttgtaggagtaatgggctacgttttgactccgtcaagtggttggcttttgctctttaggttaattaacggcaccggttatgtcctgtgcacagtttgtatgactacctggcttgcttttttagtgccgcgccaacatgttggtgaagcaatgggcttttatggtttaatgaatgctttggcaatggcgttagctccagcagtttcgattaatatttatcaaaaaataggttatcgaacaagtttggtggcatcagctgtttcagctttactaatgattgtagcaattcagtttgtgggtgataatgctttgcctaaaaagcgcgtccgaacgcagaaaaagagtttcaaaattattcaatttaatgtcctaccggtggcaattttgacaactttatttgctatcccgtattttgtaacacaggcagatattgtaacttatgtagaacaaaaacatctgactgtcgcagttggatcatatttcttgatctatgcggttgttttgttgattattagagtaggactaaaaaggtattttgatacagtacgttttggcgtctggttttggctaagtctagtttcaacggctacttatattatcttgctcgcaataatgaataatgattggcaaatggctttagcggcagctttaatggcgtcaggctatgggatcatttattcagttttgcaatcaactgcgctgttgttagcaccgattgaagaacaaggcttagctagtgctactttttatttaggattagatattgctatggcctttggcccgatgatcagtggtgtaattgattctgctttaccgatagaatggttctatccagtagaattagtcttagttccattgattttagtagtttatttcatttggcgtaagcgtttgaatggcgcaattgaccatcattagagggaaaatatgagcgaatatgtagttaaatctaagttagaagataaagaatggcaaattgccaaccaagtacgtgatcatgtttttgtttgtgatgatgttaaacatgatgcaggtcccaacccagttgagtatctatgtggtagtgttaattcatgtattgtgatgtcggcagggatgattactaaagcacatcaacttgatgttaaaaattttagggtagaaaatcaggcacaaacggagaatctgggccatggtaaatcagtagtaactgagatgaagatcaaggtcttctttgattcgacaatgactagagccgagaaggaagaatttttagctcacactttgcatgtttcaactgtttatcaaactattaaagcagctgtcaaaatttatgtggaattaggagaataagcgatgagcgagccatattacaaacaagaataccagggtgaaagaaagttagatggtgaggccccagtttttagttttgatcaaattatgaaaaaaacttttctgcgaccatttatctggaatgcaagaactaccagaagaagtttctggattggaatcgttattactgaagttataatttggattggtggaattattacatttttggcaactgttatgccagtttctcactatgagaatgattcagctgatatgataaatggttttgcttttaatggtgatcacgcttcgatgattgtcattatcggcatgatcatttggggcttgatctatctttatttgaaattatgccaattaggcctagccgtaagaagattgcatgatatcaattatacaggttggcggattctgttaatgctgataccgttaggttggatttttgttctgtattttgcaattcagccaagtaaacaagagccggtgaaatggggaacgtatctttaccttgacgaataataaaaaaatgttataattgaactataagagattacgttaggagattatttcgatgaaaactaagaatttatttacttcattagctgccgcagtgatgctttcagctggtttagctggtgcaggtgtgtctgctgcagaaccagttcatgcagcaactacacaaacttcaagcaaaaaaggtaccattagtattaagcgtagatcagtatcagctacagttaataatgctaatcctaagctttacgctgtaaaccaagatggtaaaatcgtaaagtcaatggattcaaattatactaaaggtcaaaccatccagctttacttctctaacgaggctaagaacgatcaaggttctgttactttctattatgttgacagtcaaactgtagatggacaacaatgtgcaatttatgttgtttcgactgatgttaccccttcagcaacagttccaagtcaagcagactggtacaagcaagcacaaagtgaccaaaaagccattcaagatgcttacaataatagagcattaaagtacatcgttgtttcacctaagtcaaaaaagggtgcaaagatctactacgcatataagaagagtgctaaggctaaaaaggtttactttaaggcaaccaagaagaagatcaagtacggtaagaagtacaagtcatcgatgatcgttaaaaacggtaagagcagatatgcttatattggtaagaagagatacttaaagacctctactattaaagtagtaagtgctaagtacgcaccagttcaattatcagatgatttgaagaacttaattgttcaaaactagaaaaagttaataaaaattgtagcgtaaaggatgaattattgtcctttacgcttttttgatctaaaaattaataataatattgataaaaaatctcactgacctacaatagactttgcgttatttttagggagttgtaaaaataagaatgaagagagtaaaagtctatttaggattagcttgtttgatgacgttattatgtttgaagccgcaagtggtttgggctcgagaactaaatccatttcagactaagatgattaatccgcatacgtcttatagaatttatcaaaacttaactcgtaaaggtccgtcaagaagtctatgccttgctaatacgtttaaacatggcaatgttcaagccagtgcagttagaaaagttcgcggcaataagtattgctatgtttggttagacggacatagaggcggttgggtcaatcagcgagcttttttaagaagaaaaattgcagttgtacatcagattagtttagtgaagaattcgcattatagttttccaactagggatgcgattaattatgcaacagatgcagcaggaacggtaattgagccaagtaaagttaaagtatctcgagcagaagtttcatcaagtaaaaaggaaagctatcgggtaagttattcttatggtaaagctcatgctcagacagttgttcaagtgagagctaatgctagagagggcattgttaaagcaaccaaaaaaccacaagctggagacagtgctcgtagctggttcaagcactataagacgtctggtaattggggtagaagctttgctccggaaactagaccgcatgtcttgaaaagtggacattttagactgaaaacctatttctatcaacctgcgactttatgtcaaagtgattcggtaactggaacggtgggaccagtaccagaagggcttactgtatcaaatggttcaatgtatgccacaatgtatcattcacctaatgatacgcgtgctcacattgtttcttacaaatttaatcaagtgcctaatcgctatactatgcaaaagttgccatggctaccttggtcacaatttctgcggcttgtatcccatgttaagacaagcccatatattaaattgggacatggacaagcaatcggttcaactcgaaagtatatttatgtgattgctaataaccatttattgcgcaagagctctcaatcagaagaaattatgcagattagtaaaaacaatttgcaaattaaacagatttggacttttaaagtttggaatcattcagctagaacaggtcgttatttccataatgctacttttgtaaatgatcaccaatttattgccgtttaccgtgatgccacagaccaccgttttgaatattgggaagttactcgtcagggtaatagttggtatcctaaagagattggcgctactagaggagattttatgcgcaatgattctcccgttcaaggaattacctatgacaagcataaaaaacagatttatttggcctttaatgattatttgtttaaattgaaacgctcaggtaaagtgctggctagaggtcactttcatacagggcgtgaatttgaggggattagcataaatggtcgtcatttatacgcagagctggcgcaaaggccagaattgttgaggcagaggataagataataggtgtaaaaatatgttatacccagataaattctatttaacacaagatttaaatagaagatttgccagaactaaccttgctcgactaatatttagtgatttgcattttgagaaaacaaatatttctttaattcaaacacaattagttgctgatgggttaaatatagagagggcttccgagaaagataaggaaagaattattcgattaaaacgagcatggcaatatattattaatgaaaataaggtgttatctttagatattgaactaaagatacatttattactgacaggctatggcttccgagataatctaaactacaaacaagaagaaaaatttttcgatgagttaatgaacaacgatacctcgactacagataaggcaatgacattgatgtatcataatatgcgtaatcaattattctggggcggaaataagcgtactgccacactagctgcaaataaattaatgattgaccatggagcaggtttaattaatgccccacttgataagtgggatagatggaacaagctgattagtcaatattatttaaccggcaaaatgaatatgttaaaagattggacctatgaaaatggcattcaaggagtagtgctgaataataattcagatttacctaaacctgatattaatccagaagattatgattaattacttaagcagaccgaataggcctgctttttttgtgtgcaaaagctctttttgaaaatatcatgataaaagttcataatagaaattgtttgtttatgttaaaggagttgttttattttttatgaagaataatgatcacgttaagataagtcctagtagtcttgtcttgatgattttttcttctatttttggatttagtaattcactgacagctttttatcaaatgggttattcaagtatcatttggtatattgtcacagctattttattcttcctgccatcagccttaattttcgctgaatatggtgcttcctttaaaggaattaaaggtggaatcttttcatggcttgaaggatctactaatgaaaaagtatcatttatcggaacttttatttggctggcagcttgggtaatttggttagtttcatcaacccaatttttcttagtttcagtttcaacggcaatttttggtcatgatactacccaaagctggcatttagggtcgctgacttcaactcagttattaggtgtgttgtaagttattttcttagtaattgttacattttgtgccgcaaagggaattgataaaataaaggcgattaataatattggtgggatctttactttaggaattgccattggttttacagcagtttcactttttgtctttattttgaatcatgggcaattagctgaaccagtgaccgcacaaaatatggttcattcacctaatccagcatttcagtcaccgattgcggttatttcatttattgtctatgctttatttgcctatggtggtctggaaacaacctcaggagtaattgattcagttgataaaccggaaaagaattatcctaaggctctgattacggccatggtcttaatgacagcactttatgttgtaaacatctttatgtgtggggtggctgttaattggaacaaatcgttaggtggtaaaggtgttgacttagctaatgtcgaatatgttttgattaataatttaggtattgtcactggtcatagcctaggtctatcacattctacttcactggcaattggaactgtcttttctcgtttggccggaattgcggatgtgttatcaggaattgccgctgcctttttgatggtttattcaccgattaaatcatttattgaggggtgtgatccgcgactattgcctaagaaaatggttaagttaaataagcacaatatgcctgaattctcgatgtgggtacaagcaattgtggttagcgttattatcttatttatttcatttggtggtaatggagcacaacaattctatacaattttaatggatatgatgaatgtttcttcatcagcaccatatttatttttaattgctgcttacccattttttaaagctaaaaaagacttagatcggccatttgtttttattgaaggtaagaaaaaagtttgggcaacgacaattgttgtttggttagtggttgcggtcggaattatctttacttgtatcgaaccactctttaccggagactggcaaacttcattctggacggctattggtccagtggcctttggtgttattgcttggatttattacgcatataatgaacgaaaagaaaaagcaatggcttaatacgcaaaataagacgaaggattttgtccttcgtcttatttcttttctctattttttactttaagccagctactctgacaacatcacgttcaatcattaattcctcattagttggaataaccataccaacaatagttgagtcgggcttggtaataatggtggcattttctttattagcggctgaatcaggcttaaggcctaaaagttcgagtgaatccatgacatgttcacggacaccaaagtcgtgttcaccgacaccagctgtaaaggcgataccatctaggccacgcatttcaagggtataagcaccaatatagcgaatgattcgattaatgaaaatgtttctagctaagtcagcacgcttcttcttttgcccttcgagcttagtcatgtcaccacgtaaatcacgcatatctggtgaaatgcctgaaattcctaacaaaccagattcgttgtttagaaccttaagcatttgatcagcatcaagattttcctttttcatgacaaaagcaagtaaagaaggatcaacatcacctgaacgggaactcatcgtaatacccgccattggtgaaaagcccattgaagtatcgaatgatttaccatctttcacagcggtaactgaagcaccagatcctaagtgacaaacgattaatttcaagtcctttaagtcgcgtttcataatttcagcggctttttgactaacatatctaaccgaagtgccatgtgcgccatattttcttgcaccgtatttttcatagtatttatatggaagtgagtacaagtagtgcactggatccaaggtttggtggaatgaagtatcaaagacagcgacttcagggacgccaggcaatactttcatgaaggccttaatgacatcggcttcagcggtattatgaagcggcacatattgtttcaaatcataaatcttttgtagtgacttttcatcaattaaggtggagtccttaaattcttcaccacccgcaacaattcgatgtccgattccgatgatttctttaggatcgtcaattaaatcatacttttttaaattttcaagcaagattgtaacggcagtttcggaatcaggaatgtcaactttttcttggtgtttttcacctttaaccttgattgtaaatgtggagccgttaagcccaactcgatcagccatcccttcgctgataactttttcatcaggaaaggtgaaaagcttaaatttaaaagaagagctacccgaattaatcgctaaaatttttttcataaattatgcctctttttcttaatttttgcagtacaacctatccagtaagggtatgcaataaagaaaatgccactaatctgctttaagtaagttcttgcagtaatagtgtcaacgtctttattatacaacttttgctgtaagctcttacagatatttttttattactaaaatttatatataaatttgattgatcatatataaatttagaatatcaatttgcaacaaaaccgcttacaaactataattaaattaatatacaataatatgttgagaggagaaaaacgaatgacccactactacgaaggctttccacaaagtgaccgcgatgaaaaaatcaagatggtgaatgtggatgaacttgaagaacgtgttaagaaggtaatgccagaaggtgcatattattatattgcttcgggtgcagaaaatgaatggacctggcgtaacaatactgctgcttttaatcattttcaaattgtacctcgtgctttgactgagatggctgatccgcaaactgatactgattttatggggatgcacttaaagacgccaattatgatcgctccaattgcttgtcatggaattgcacataaagatgcggaagtcgcaacgcaaaagggtgctgctatggctggtgcgctctttagttctagtacttatgctaataagagtgtagaagaaattgcagctgcagctccagaagcaccaaggtttttccaactttatttgagtaaagactggaattttaatcagatggtttttgatgcaattaaaaaagctggttatcaaggcattttcttaaccgttgatgctttggtatcaggttatcgtgaagcaaacttgcggactaactttacttatcctgtaccattggacttctttaagcgttaccttggtgcaaaaggtaaaggtcaaagcgtagctcaaatgtacgcttcttctgcgcaaaagattggtcctgaagatgttaaaagaattaagaaagaatcaggtttgccagtctttgttaaaggtgttatgtgtgctgaagatgcctataaagcaattggagccggtgctgatggaatttacgtaactaatcatggtggtcgtgaagttgatggtgctcctgctaccattgatgttttgccagaaattgcgcaagcagtaaatcatcgggtgccaattatctttgattcaggtgtccgtcgtggctctcatatctttaaagctttggctttgggtgctgacattgttggaatcggtcgcccatatctttatggtttagccttaggtggtgcgcatggagttgcttcagttattgaacaattaaatgatgaattaaagattgatatgcaattaacgggatgcaagacaattgatgatgttaagcatgctaaattgacgcacattgcttatactgctgataatttgccatctaatactgatccaagcagacgcaaggaatatccggtaactgacgaaaatcaagttaagcaaactgatgcggtatctggtgcttctaagttagaaggaaagccagctccggaaccagagactgataccacaactggtgcttcagtaagataaagcaaaaatataattaatattttcaatatgattgtcattgaataaatgatagtcatatttttttactatcaagaactcagcggctacaatcaaggtgaaagcgattcgatttttggagaggaaaattaaattattgaagagaataatgttttgactgatactgaagagcttaaaatcttgagtgatcttgttgcaataaaatccgttaatgataatgaaattttagtagcaaaatatttacaaaaactattaggagaacatggaattagttcacgtttgttggaatattccacaactcgcgcagatttatttgctgaaatcggaacaggccatcccattttagcaatttgtggtcacatggatgttgtttcaccaggtgaattagatcaatggcatactgatccctttaaattaaccaataaggatggtaaattgtacggccgcggagcgactgatatgaagtctggtttagctgccttggttattgccatgattaatattcatgaacaccatttaattaagcatggtagtatcaggctgctagctacttttggttggtgaaccttctggctacagtattgccattgctcataagggttcgatggatactaagttaacttcccaaggcaaggaagctcatagctcaatgcctgaaaagggttataatgcgatcgatccattaatggatttattagttaaggccaacaaggcttttagagaaacagataaaaacaatccagacttaggtaagttgacgttcaatactactgtttttactggcggggaacaggtcaacatgattcccggagaggctaccgcgcaaattaatgtgcggactattcctgagttcaataatagtttggttgaaaagaaattaactgaattagttaaggcagaaaatgcgcaaggagctaaaatcaaaatggacatctatatgtcggaaccttcaattaaaactgacggtaagtctgaatttgtaaaattagcccaaaaaattggagcaaaatatgcggaaaagccgattccaacagttgctattaaaccagtaactgatgcttcgaatttgattgccgacaaaggacctagctatccgtttgccatgtttggtcccggtaatgacacgccgcaccaagttaacgaatatgttgatgaaaagatgtatttgaactttgtgaagatctatactgaattgtttgtggcctatttgaataaataatttggaaagtaataaagagcctaggcaaaattttagcctagacttttttattgtattttgaagtattctttagccgcatcactcatccgttcaggggtccaaacaggataccagacaaattctacatcaacatttttaacttcagggacttttttaacggctgttgtaatctgcttgatcaaataatcagtcaaaggacaggcaggtgtagttaatgtcatattgatgagacagatcccatcttgatcgaggtcaatttcataaatcagccccaagttgaccacatcgacgtttaattctgggtcaataacttgagctaaatgttcaataatatcgtttttaattgttttgctatcacgcattgtgttacctacgcatctttaccaaaaatttttgctttaattgcttgacctgttggtgtaccagctaaaccgccgattccagtttcacgcagagatgccggcatttgatgaccaactttcttcattgcttcaatacattcatcagctgggattacacttgtacatcccgctagcgccatatcagctgcgataagtgcattaccagcgccaataccatttcttttgacgcagggaacttcaaccaaaccggcaatcggatcacagactaacccaagcaagttagacatcgcactcgataaagcttgggcactttgttcagcactgccaccagctacttcaactgccgcggcagcacccatggctgaggcactaccgacttctgcttgacagccgccagttgcccccgcaatttcggcattattggcaatcaccatgccaaaaccgccagcagtaaaaagaaagcgaatcatttgctcttcgctgagctgtaatcttttttctaataaaaatagaacgccaggtaaagtgccggaagaaccagccgtcggggtagcgcagacaacgcccatcgctgcattgacttcgttagtggctatggcattttcaactgctgccatcattgtatcgcctgaaagtgtgtgtcctttctcgcgatattttttcagcttaattgcttcgccaccagttaagccagtttttgaaaagacaccgtttccagattcacctcttttaacggcagctcgcatagtttgcaagttatatttcatgcgctgccagactttttctcgtggcaagcctgatagttgacattcttgttcaataattaattcagaaataggtttgtgcgttttttctgctgcagcaacaatttccttaatatggttatacataatattgccctatgttataaacaaataatattctcaaattttttatttagttcttgcaataaatcaggatgaagataattttctacatcatattcataaatattatagtttttagtatgaaaaattcgtttgcgactaaagggtgctttttcgtgtaagagcgcggtaagctcttgttcaatgcgaatatttttgtgtggatcaactaaaataataataggtaatgcaccagcaggttgaatctcggtattatgtaagacaattttgcgaatttcaattgcaccaccaccgatagagcatccagccaattccactttctttttatcattagacatatttaaaatagcagtattagggtgaccaattgggctaggaccatcttcttcaacaaaacgtaaatctacgccgcgctggcgtgcaatctcaggtgcctttggtacgcgtagatcgtctgagtcaaagcctaaaatacctgccgcaatagcatagtctgttccatgaccacggtgagtttgggcgaaagagtcgtaataatgaacggtaactttactcggggtaccgccaaaaagtttgtaaccagcgcgtccaatagcgacggctccggccgtatgtgaacttgatggtcccaccattacggggccaataatgtcaaaaacacttttataccgattagtcattttaatccctgctttgtaagttattctgtttttaattataacgaataataaagaagattaagaaagttttttgcaattttaaccgaagttttgtcataataatatgaaaagtgaaagaggttggttaaatgactaaagaaaaagcagaattaaaacaaagtttggagcatctagctgagcaaaagggcagccagcaggcagtttcttatcaagacttatttacaccacaattgatgcaaaagtatactagttttgctactattgacttttttgtcagagaattgggcgtgaaagactttacgcaaattgagcagatggcgatagatcaagtcgatgaatttgttaaaaaagagaccaagtttgctagctgggaagaaatgcaacaaaaggcggttagcgagtacatgatgaagttattttagcaacaaaaagcgagttagtattaactttaaaactaactcgctcttttatttactatgttaggtgaatgacttgagcacctaattcatcaataaagcgctgatcatgttcaattactagcatagtaggatgatattttttaattaattgaataatttgttcttggttaaagacatctaaatagttcaaaggctcatcccaaagatacaaatttgctggttcaagtaaggacttggctaagtagacctttttttgttggcctgaagacatttgattaattgaattagtgaatatatcacgttcagtacctaatttgtgtaagatattgagaaaatcggcatagttaaggtggtgcttttgggcaaaatcttttaatgataggttattagattgttcaatctgtgataaataggagattgaaatcttatcagctgaatgcaatctgccagtaattgttccagcaaaagtattagtaattgccttaaacaaactagattttcctataccgtttttaccagtaatcacaatttggtgaccacgcattaaatcaaaggtagtaggttggaaaaggggaagcttgtcataagcaaggctaactcctttagcagtaattagatgtttatgatggtcggggacaaaattcatggctaggtcattgtctgcttcaatattttttaaaagaccctttctttcttcgatatttttatctaatcttgcttctacatttttggcaagtttcatttttttggcggctttgtgtcccatgaatcctttatcgtaaactgtacttctatgtcgaatatcgcctttcatcttggctcccgcatttttgttgctttcggaacgctgggcaaaagtttgcatcttttgttgactggcatggagatttttaatttgcttttctaactttgcattataagcgatattagattcatcttctaattctttttgtttttcataacgagtatagtttccttgttccagcctaattttttgcatttcaattgctagggtgtgatcgacaactttatctacaaaatttcggtcatggctgattacaattaatccctgttttttattatgcagatattgtgctacttgattccgtgtatcttcatcgaggtgattcgttggttcatctagtagggcaaaggaatgttgattaataaaacaaagcgccagtaaaatttttgtttgttcaccgccactaagtgttgaaaagggctgccaaatgatattttctttagcatgaagcagatttaattctcgttttaactcccattcctcgaaattaaactgttcttgtaaagcataaatagtaaggttatcgggattattaattacctgaggatagtaattgaattctaaatcactttgaatagttccttgatattcgacctgttttagcaacattttcataaaagtggttttgccgcgaccattacgaccgattaagccaagtttccaattagaatcgagatttaggtttaaattatcaaaaattttatcctgaccgtcataggcaaatgaaacgttttttagtgaaattgtagacataaaaaagcaccgtcctctcaaactgtgcttatgatctgagaaaatggtgtctgatagattagtccaagttggctaatctataattattcttaatttaaattaaagaaaatcacgcaggctaatttctgatcacaagcaaaaagtacatccttaaactagtagaatgcattattttttacttaacgaaaatcagaaattaaaaacgcatcggcgtgagtcctcctattacttgaattgattaatctggcaatactttaccatcaaatataattatttgtcaatatttttatgataattcatttgcaagctgtgattaataagtgataatgtctgagaccgtaaaatattttgtgtaaggatgaataattccttaaattaatttcttaaaacattagaaaaaggagttcctttctcgtatgattggtttgaacaaaaaaacacatacagaaagaagaactccttcatgaatgattttacccaaaatatggcacaagctctattcaatcaagacaaaataaacgatttattgcgcaaagaactccagcaagcagttaatgacttattagaggctgaactgactgcgtttttaggctatgatccttatgccagagctggctggaatacaggcaattcacgcaatggtgcttactttcgcaaggttgatacgcaatttggcgagattaaaattcaggtgcctagggatcgcaacggcatgtttcatcagcacacgctccctgactacaagcagcactccaatgtcttggaaagcatgattatcaagctatattccaaaggcgtaaccactagagaaatagccgacttgattgaaaagatgtatggcagtcattacagcccagctcaggcatctaacatctccaagcagatgattccaaaagtcgaggcctatcatcagcgcaaactcagtgacaagttcttctgcgtttatttggacgctacctacattcctttgcgccgagaaacgtttgagcgtgaagcagtctatattgccattggcatcaagcctaatggtcacaaggaagtcatcgattaccgcattgctcccagcgaaaacgtcgagaattggacggaaatgcttcaagacatgaagtctcgcggtctagaacaggtttagctctttctttcagatggcgttgtgggcatgaagacagtgctggagcagacttatccgaaagctcattttcaacgctgtctagttcatgtcatgcgcaatatttgcgctaaagtatgcgtagatgatcgcgaaacgatcatgaatgaattcaagcaaattcatcaacagccaaataaggaagccgcgatcaaagtcttgcacgctttctatgacaagtggaacagagcgtacaaccatgtcatcagaaatctcaaagagattgaacctgatctgctagtcttttacagctatcctaagcagatcagggcttcaatttactctaccaatatgatcgaatcctttaacaacgttatcaagcgtaaagctaagcctaaagcagagtttccaactgaacagtcgcttaatacttttattggcattcaggcaatgagctacaatgaccgttatttcaatcgaatccacaaaggctttgatcaggttcaggataccttagaatcctactttgattaaataaaagattaaaaaatcaatctacgagaaaaatctatttacacaaaaaatttgacagtttcagattaaatttcttcactacttaattcaaacatattaataattgatttaaacatagataaaagttgtttaactattaaaaatgaattttgtgaatataatgttatcgataacagaaatcatttttatattgcaaatgaaagcacatacgtttattgttgaatttgaaaaaacatgattttgtggaggaatttatttatgaataaaaaagagtggtcataatatcaaatttaaatcaatttttgtatgtacttcagctattatgagtctttggttaggggcaaacttaactacgactcaagttcatgctgcagaggacaatgcagctactgctactgtacaaaatcaaagtaacgcaaaagcaaagcagcgtcaacaaggtgtagctcctcaaaacgttcctacagttttggcagccaaaactaaagatgagggaacaaataactctccagcacgtgaggaagttaaagatcagactaaagtagttattcactacaatggtgatggtgaaaaatgggttccttatatttggggtaagaaacctaatggtaacggcaatgaatacaaatgggccggcaaagatgataatgggtattactcggttattgatttagataaaaactatgaccaagtaggagttttaattaaaaccaaaggcagttgggctggtaaagacggtacaggtgctgatcgtagcttaaatgttagcgataatggcaaagcggaagtcttctataaagcaggtagtgatgatgcccaaaaggtaacaccagagtaccattccgcaaatataaatttgcattattacggtgatgaccaagttaataaggttaatgtttggacagataaggatcaagataataaacaacttattagcttaaccaaacaaggcaatagtcaagatggctcaatcaaattagacaatactgattttaataaactttttgttgcgccagttggttctgatgaaataacaagagaattcactccgttaccgggtaataaggcgacagatatttatttagttaaaaatgatacagaagcttattatagcaagagttttgccttagctgatcaaagtctatcttctgcatatatgacttcaccagatagtttgactgttgaagcaggtaaggctactactgtcgataaaattaaaggaaaacttagtctgcgaaataatagtattgatcatattgaagcagtcgatgctaatactgatggtaaagcaaagaaatttattattcataccaaagcagatattgatattttaaaggataaccaagttggactagggatgaactttaaaaatgttgatatcggtccttatgttcgttccaaagcttttgacgataaatatgcctatgatggtgacgatctaggctgcacctatgatagtaaaaagacgcaaattaaactctgggctccaactgctaaagaggttgaattgaatttatatgatagtgttgataatagtgccaagcctacgaatgttattgctttgacaagaggcgatagaggtgtttggactggtattattaagggcgataaaaaaggctgggcttatgattttaagttaacttttggtaatggcaaaataacacagactgatgatccatattctaaagccgttactgtcaatggcgttagaagtgtaattgaagactacaataatatcaaaccgacagattttaaccgaatgccttcattctctaagccaactgatgcaatcgtttatgaaacttcaattcgtgactttagtagtgatcctaactcaggaattaaagataaaggtaagttcttagggatgattgaatcaggtaagacaccaactggacaagttactggcttagactatctcaaggcattaggcatcactcatgttcaaattatgccttcatatgatttcgctagcattgatgaaactaagagtttaaagaatcaatacaactggggttacgatccaaagaattatgatgtgcctgaaggatcatattcttctgatccaactaatccaactgctagaattatcgaaatgaaagaaatgattaatggcctgcataaagctggtattagggtcattatggacgtggtatacaaccatgtttataatcctcaagagcaagcttttgaattaacagtgccaggatattatttccgttacgatgctgataataataccacaagtgatagtggctgcggtaatgacattggtagtcaacgtaaaatggttcgcaagtacattgttgactcagtagtttactgggctaagaactacaatctagatggcttccgttttgatatcatgtccttactagatcgagagactatgaatgatgttagagctgctctagataagattgatcctggtattattacttatggtgaaggctgggaagttggtaaccagaaatatactagagaagaaggaacgacccaatacactgcggataaagttcctaatgttggtttctttagtgatgatatgagaaactcggttaaaggtaatgatgatggctccgaaccaggattagtaattggtaacggtaatgaaagaaactttgataagcatgctgtcttgtttaccgatagttttttaagaggtaaatggttacataatgattcttgggagccacataactatgcaactccaagccaaatggttaattatgccgcttgtcatgatggtaagacgttgtatgattacatcaaggctgcaatgccaaatgaatcagatgagaatagtgccaggagagtaagattggctaactcaatgatcatgctttcacagggtatttctttcttccactcaggtcaagaagcattaagaactaaaggtggcaattcaaattcatataattcaccagtaaatattaatgaaattaattgggaaagagttggtgctaataaagcatcagtccaatatttccaaaaattggctaaattacgtaaacagctgccaattttgcatttgaatgatttcaataagatttatgacgagaatgttactaaaattattagttatggtagagaaaccaaagataaaaacatcaagggtgtatttgagtacgaatataatgttaatggcaagaagttattaattgtctttaatgtcaacaatgataaagttgctctaaataatgttgatttatcacatggtaagaaattgttagatagtgatggcaatgtgaaattaagtgataaaactatgctggcaccattaagtacgcttgtagttgatgaagatggaacaatggttttaccagacgtgccaaaaccagatcaacctgtaagtccaaccactccaggtgataagccaggtaaaccaactacaccagaaaatccaaggattccggatcaaaagccagccaatccaattgttccgcaagaaacaattattacacctgaagctccaagtgaaaatagtattatagacaatactaaaaatataattaatggatcagaagagactactacagtttctactcaggataatacaaccactgaaatattattgacccataatgcttatgtgtatgacagtgaagcaaatcctatttatcaaaatgataacaagcttgtcttgaaagctggagatacaattaagcctttggataatggtaaaaagtatagtattaaaggtaagttgttctataaagtagctaaaaatcaatttgtcaaagttgctaatactgttagttactataagttagctcataactcattcgtttataataagcatggcaaagcagttaagaagaatggaaagcgcattttacttaagaagaataagcatatttcacttcattctgataaggtcgttaagattaaagggaagaaattctatcaattaaaagatggtagctttattaaggctagaaatgttaaaagaattggttagatttagatagttaattaaaaatattaaaaaacaagattgtttccaaaatgggcaatcctgtttttttaatcctgattaatcaagctaacgggcaaagtataaacactctccaatgataccgctggatcattaatttcgcaatctctttagtccgttgccgcgcactaattaaatgtgggaataggttctgaatcaattgtgtgccgtcaaatcctgtaattaacgattttttatttaaataatcgttgcattctttagccaataaagccgtaatgtcatccgtacaacaaatcgcatcgtaatcgttatctttcaaaaattgaaggatagcgattacgatgcgataattgattcacgggcgctaattgagcgtaaatcaaatttaacgtcaaaggtattacacacacacatcatccctttgatacgatcactgattggataatagtcttctttggaaccagcaataatgattactttcttctttttttgctttaaaaccgactttgcaatttgcatccccgcatcatagttattcgactgcacagtagggatctgcggactaattacccggtcaaaactaaccaccggtagattaagcttgccactcttctttgaaatctggattggcgagctggtaagtaagcctacgatctttttttgcttatatttatccaaataatactgcatatcttgctcttgataatgatctaaatgcaaaatgcaaaatgcaatcataacctttatcctgcaaaatagtagccaagtattcatacagttctgaatagaaaggattattgatttgcgaaaaattgatttcaattaagtttaattctgttttagcggaaattacattcttgggtttataacccagttttttgatagcttcctttatttttaaagccgaatcaatgccaacgtaaccattctgattaagatatcgcgaaacggtggcaatagaaacgccggcttttttagctatttctttaatagttactgccatgttttacacctttatatgtaaatcctacacactttctatcagtaagtatagcatattctaaaacctgaattgtcaaattaagtgcaacagttaggctatgaggaaatatattgcttaaagagttcttctgctgtgtgatattgaaggattcgacgatgtttgcggttaatggcatcagttgcctgttgaacataagcagctgacttatctttcatgcttttgcctttagggaagaattgacgcagaagtccattgcagttctcattggtgcctctttcccatggagaatatgggtgggcgaagtagatctggcagcctttgatcttggtcatatccgcaaactcagagccattgtcaaacgtgatcgatttaaaacaggcaggatgtctgtcaatctcattttgaagcagccttgggcatgtgcttgcccgatagtcaggaatcttgataactacttcaaagcgtgtggttctttcggtcaaagtcattaaagcaggctgattcttgcgtctgacgcctttaaccagatctccttcccaatgcagcggcgtttttctgtcttcaatctctttaggacgctgttcaatggaattgccaagatgcttcttgtgcaaagcgtgaccgccatggctgtgatgacgcttgttcctgcgtcttttgagcttcataggcagatcaatattgcttatgtccagcaagccctgatcaatatagcgatagacggttggtgtgctgggacaagggtagcctggcatagtccttttgaattcaccaacgaattcatcgatgctggtggcatcaaatttagctttaaagcgtccccaaaaagacagcataatgcttcaatggattgcgctgatagcagtttttgcgacgcttctcataataaagctgtgcagtatcagcgtaatagtgctcatacaataaatagctgctgtctctttgcaggacgcttccgcgtttgatttcgcgactgattgtcgacttatggcagccgacttcttgagcgataacagtacgggaagttatgccggaatccagcattgcttgaatttgtccacgttgtacgctggttaattgatgatagtgcttagaaatgctagaatttgaattggtcatgaagatcttcctttcttgatttttcgtcacttcaagtttaggtcttcatggcctttttgtttaacactcagtgttgcacttcaattttaaatccgggtccattattaattcctttcatagaaaactaaattccttttctaaaggggtcaagagctattatatacagttttctcagcagttacattcgcaaaaaagaaaaatgctaaatttatttaaaatatttagattttttatgcaataaggacaaatagctaggagaaagaacaaagaatatctccccatctattgatgtaacgctaaaacataatttactttctttcttttttgtgtatactaaatatacacaaaaaagaaagaggcgtacaactatgactgtaaaattaagaaaagttggaaattcaaaaactttaacagttcctaaagatataataattactagtaaagagtatactgtgaaaaatgaggggatgaatatagtttttacacccgtcgtgaagaaaaagaaaaatatttttgcaaccaaagaatggcaaaattatgattatcaaaaagacatagaaaatgacgtggaactacaatcagtaaaaccagtgggacgtgaggtagttgattaatgatttatccgaaaaagggagatattgttaaagcagatgcagaacctcattccggacatgaaatgggtggccataatccgcataaaggtaatattagaagacattatgtggtaatgagtaccagtgcctataataaatcaacacatatgtttatagggatgccgattactacttcagataaatatcaaggcaacccacattacgagccaatattaattccaggcagtaatggcactggagtaaaaggttatgttgttttatggcaacttcagaattttgactttgaatctagaaatggagaaattgttaatcacgtaaatattcagctattagacaaacttcaaggtttcgcgaatgatatggtgggactagaataggtaaaacaattatgccaattttaaggctagttcgattatgctgagaggacgattctgaggtcaagttcgactgcagaggttaaaatattaataatcatttaatgcaatagaatgctaattcttatttttatgggaaattagcattcttttttgtactttctaactatgtagaataatgagattttattctacatagtacatctaatcatgcattattctgctatgccaattttggggtgtgttgattatgtagtataattagctatagactaattattcaacatagagtgacgaaatacttgtatatcaaggactaatataaaaattgacagaaggagacgtaaattgaagcataaagatactcgtccaattactgatccaataattttaaagaagtttttgaaacatttacgtgaagatactagtatgggagaaagaaactatgctatatttcaaaccggtaaagcaaccttactacgggtaagtgatgttctagctttgaaaaagaatgatgtctttcaagccaatggcagagttaagaaaaatgcttatatcgttgacaaaaagacaaaaaagcctaaccgattatatttaactccagttagtgatgttttagaggattactatgattggctgcaagaatatgaaaagaagcatccctacacgaagctgttttcttctgaatggctatttccaagttctaggagattaggtgaggatgttccaataagagaaaatagtttttatagaatttgtcatcagaccgggcttaaaattggggttaattggattggctcacactcaatgagaaaaacaggagcttttatggtttatcagcagactaatcataatactgctttagttatgaaaatgctaaatcactccagtgaagcaatgactttaagatagagaccgtaaaatattttgtgtaaggatgaatatttccttaattttattttcctgaatattagaaaaaggaatccttttcccgtatgattgatttgaacgaaaaacatactagaaaagagattccttcatgaatgattttaccaaagatatggctaatgctctattcaatcaggataaaattaatgatttatttagacaaaagctccaacaggctgtcaatgacctgcttgaatccgaattgactgcctttttaggctacaatccttatgagcgcgatggctggaataccggaaattctagaaatggtgcttattaccgcaaggttgatacgcaattcggacaaatagaaatcaaagttcctagagacagaaacggtgagtttcatcaacacactatgccagattataaaaggcatactgatgttttagagcaaactgttatcaagctctattccaagggcgtcacaacccgagaaatcgctgatttgattgagaaaatgtatggcggctattattctccagctatggtttccaatatttctaaagaaatgattcccaaagttgaggcatatcatcagcgacatctgtcagataagttcttctgcgtttatctcgatgccacctatattcctcttaagcgggtcacttatgagcgcgaagcagtttatatcgccatcggtatcaaacctaatggtcataaagaagtgattgactactgtattgcgcctactgaaaatattgagatttggagcgaaatgctcaaaggcttcaagagtcgcggccttgaacaggtagagctcttcttgtctgacggagtagttggcatgaaagaggctatctgccagtcctatcctaaagcgcattttcaacgctgcttggtacacgtcatgcgtaatatcagtgccaaaatgcgggttgacgatcgaaaaaagcactggatgaattcaagcagattcatactcagtcaaacaaagaaatgactgtacaggtgctgcatgaattctatcaaaactgggaaaaagcctacaaaaacgtagttagagatcttagacaggttgagcctgatctgttaaccttttacaactattcgccagctattagagcttcaatttactcaactaacatgattgaatcctttaacaacaggcttaagcggaaaaccaagcctaaaacagaatttccaactgagcagtcgcttgacacctttattggagttcaggcaatggattacaatgaccgttactttaacaggattcataaaggatttgggcaagttcgagacaccctagaatcctattttgattaaaagataagtaaaaaagtcaatcaacgagagagattatttacacaaacttcttgacagtctctaatgtcttaactgttaacttaggaaaatgtcctaattgtagtaagtatgacataatttcctttattggaggttatagttagagtgaataggattgatttaactatgaaatatgatgaacagtacaaagtcattaaggatcttgtagatcacaacggcaataagaaaagagcagccttgaagctaggaatatccgttagacaaataaacaggagaatcaagcagtatcaagctaaaggaaaagcggccttcgttcatgggaacaaagaccgcaaacctgttaattgtctcaccacagaaattaacaatcaaattgtaaccttataccgtactaaatatcaagactgcaatataaaacattttgtacagctgttagatcgctttgaggacattcatgtctcttataccaaagcttacagcctgctcaagcagcaggatattctttcccctaagccttggagaaagactaagcgtgccttagccaaaaagaaatggcataagcagcaccctaagcaaagcaaacaagaagtcagcgctgcagttgatcatcaactagctttggcagatgctcatcctcgccatgaaagatgcaagtacttcggcgaagaaattcagatggatgcttctgtcttagtctggtttggtaagcgtaaggcttacctgcaccttgcaatcgacaacgctactggcattattgtcggggcttattttgactgggaagagactttgaatggctactatcacgtctttgagcaaattcttaaggaatatggcattcccctttgctttaagactgataatcggactgtattcaattatgagactgctcaaaccaaagctgcccataaagatgtgctgacacaatttggctatgcctgcaaaactcttggcgtagatctaaaaactactagtgtttctcaagccaaaggcatggttgaaagagctaaccaaaccgtccaaggtcgccttaagccagaactaagattggctggaatcatgacaatcaacgaggcaaataaatacctgcatgatgtgtttgttcctgactttaaccaaaacttcagtcagactagtcgtaaagcctggtctgtttttgaaaaggctcctgatgaccgcaaaatcaattataccttggccgttctcactggcagagtgtttgatagcggctcagctatttctttcaaaaacaagctttatcaagcaacagatgaatatggcaaattagtctgcttcatgaaaggaactaaatgtctggtaattgaagccctagatggacaactgctaacgacagtagatgagcatgtatatctgcttaaataaattcctaagaatgccaaaatatcgccagaagtagaccaagagcctaaaaagaaaaggaccaagaaaaagtggattccaccaatgtcacatccatggaagcgagaatcattcataaagcaacaaaagagagctcataaataccatcaatacgtataaaaatagcggagagcaaattctccgctaataattaaataattttgggacattttcctaaattattgacatatttttatgataattcatttgcaagcgtaagtcctcgtaaattggttttccacctaaaatgtccagaatgtagtaagcaacgaaagtaacaataatcattggcaatacttgctggacagtcccaatcatttcagtcagtagcataattgctgtgaatggtgctttttctattgcaccaaaatatgcggccatggaaatcactaggatatgagggaagtacattggcaaaataatctgcaattttatcataatattggcgcaaattattcccaataatgccccaagaactaggataggcatgaaaataccatcaggtacggaagaatcatatgaaagcattgaaaagacaaaccgaattatcaagaataagatcggtagtaaaagaaagtcccatgatccaaaggctttgacattccaattcaaattgaataaattatcaattaacacatgtgaaccaccgagtaagtgggcattaaatagaccaactggaataattaaaattaaaggaatgatactgtgataggctgcagggatttttttaattttactgaaccatggctttagcgaaagtagtacatattgataaatgtatgccattattcccaaaaagataccaattaaaggtaaagcccagtatgcagtaacaggtaaataatcgttaacgggtaaataaaggaatggtttgtttccaaaggctagaatagtaacgaagtcagctgaaaaagtggcggccaagacggctactactttttgaggtttaaaatcaaaagtaatttcttcgaccaagaaaagtgcaccagctattggcgcgctaaaggcggcagccaatcctgcagccacaccgcattattgtagcgttctcaaattttccttgttagatttaaatactttttctgctaatccttgaccaaccattgcgcccatttcaatacaaggaccttcacgacctagcattaatccaggacagatagctaataagcctccaataaatttccgccaaagaatggaccaccatggcatcttattttcatttaaaagaacagcctcgatttgtggtacccctgagccaattacttgttcaaggtaaggcgcagttattttacctaatgttattgcaataatgaacatcaataagatgtagggtacgatcagtactcgctgggctgccatttgcggataaatttgataaagcaacttcatagtttgatcaataatccagcgaaatgcgctaactataactccagtagttagcccaactgaaattgcttgaaccaaagttttagtcatgttggttgaaaaaaggttttgctaaaatctgttttgcatttttaatcattacatttccccatattacagacgatacatcctttttatcctaacaaaatatagcaaaaaaggcatttatgtttttgatgaatgatcttatttttgtaaaaattgttgttcccaatcatagacattttttatatgcttctttaaagcgttagaggctaacaaaatatcttttttctcaactgcagaaataatatccattatttcctgaaccgaggatttcatacaacgatcattgtctacgatggcataacgcatacgattggtttgagtacgtaaaagatcgatggttcgctgaagcgtgggatttccggtattttcagttaaaaatacatggaatagttcatcaagtttaagataagcttgccaatcatgttttgctaaaatttcttggaattttattccataatcattagccagttgtggatctaaattgggaaaatttttttccaaggcataactctctaatagagaacgtaaatcataattgtcttttaattcagctaatgtaatatggctaacgatttttttgtccttgacgaactagtaagccttcattttccaattgtttgattgcttctctaattggagtacgagacatgttaagtttaatacgcgtttgattttctgataaaagatgacctggcttaaaatgaccagtgtttatttgatctttgataaaaagatatgctttttcttgattattcatttggttctcctaactaagataattttacaacttttttattttttatattatttgcaactaataaaactaaaaacttgtatacaggttatctgtggtaaatcgttgacttacaaaatataagttttactatgtaattgtaagttaaattttgatagaaatgaggaaagaaaaatgactaaaattgcagtacttggtgcaagtggacaaattgctaaattagcagaaaatttatttttggaagataaaaataatgaattaattttatttttacgccatcctaataaattggataaaaaagatatcgatgatcaacgtgaaaggattgtcgtaggggatgcaagtaaattggatgaacttgctccggctattaaaggcgcagatatcgtttatgctaatttagctggttcaaatattgaagatcaagctaagacagttgttaaagctatggatgaagatggtattaagcgtttgatttggatttcctcgttaggagtctatgatgaggtaccaggcaaatttggtgaatggaacaagaatattttaggttcatatttgaccacttatcgtgcagctgctgatcaaattactgctagcgatttggattacacgattattcgtccagcttggttgaccaataaagatgaagttgactatgaaataactgaaggcgcaactaccccatttaaaggaactgaggtctctcgtctaagtgtggctagttatgtaaatgaaatagttaaagaccaaagtaaagacagtcgtggtaatgttggtttaaataaaccaaataccgacggtgataagccagcttggtattaaaacaaaaaaataaagaccagcttcaaactgaaactggtctttattttggcttaattatttttcgaattgtttgccccaagcccatggatcttcgtgccaggtctttaagacatcatattgcgtgctagaaatatgacctgactcattttcctttttgagtaattcagggtaggaaagaagcggagcatatttaacattagctttagcaaagttttcttttgcatccggtaggtagtaggtgaaaattgaagaaacgccaatgacgttgccaccatctttttcagttgctttaactgcatttaaaacggaaccaccagtggtgattaagtcatcaattaaaacgatcttatcatctttactgaaacggccttcgatttggcggcctttgccatgatcctttggcttaggacgaacatagatcattggtaagtgcagtttatctgcaacccatgcggcatggggaataccggcggtagcgacgccaccaataatagtagcctcagggaattctttggcgattaaattagctaaatcaccagcaatcatatcgcgtaattctggatatgaaaccgttaacctaaggtcggtgtaaattggagaaagcatcccacttgcgtaagtgaatggtttgtcaggtgagatagtgataattttttcttgaataagttgactgataatttgatccttatgcattttagttaaactcctttttaattgcttcatatgcagcttctgggtcactggctaaagtaattggccgtccaacaacaatagcgcttgagccccattctttggcttgcgctggtgtggccacgcgagattgatcgtctttagcattgccagcaggccgaattcccggtgtgacatataaaaagtcatcgccaactttttcgtgtaattcttttacttcaagtggtgaacaaataaccccatctgctccagagtgcttagccatttttgctagcgaaagaacttgctctttcattgacagtgcgcaattttgttcatgtgccaatacttcatcagaaatcgaagttaattcggttactgctagtaacttaggcacgcttttgccaacaggtgtacccgcgattaaaccgtctttagctgatttgatcatttgactgccgcctaaagcatgaacggtagtaaaagtaattcctaacttagctaattgtttagccccgttataaacggtattagggatatcatgcaattttagatccaagaaaatcttataaccttgctcagctaagtctttaaccacttggttgccagcgtgatagaataattccataccgactttgataaagacgttttctggtttgcctaatttagacaaaatcttatgcagttgctcttcattgtcaatatctaatgcaacaattacaggtttcatttttcctccacaaaaaaagtctatcttagcgcagagagacaccaaggatagacttttcctagataatttaagtcaatattttgaacttgcggtctctctgtaccgtttaaagtttgatcaaggtgaagtttaacacctcaaaagtaaaaatacaaataaaatttttgcttggaaaaaattataatcacgtgtagaatcatttcttgaaaaaataaagagtgtccgtgagcattcattttggaggaaaattatggttaatacacatgtaaaattaccaggtttagatttgaaaaatccagttatgccagcaagtggaacttttggcttcggcgatgtgcctgcagctaagaagtttgacttaaatgatcttggagcaatggttattaagacaactacgccacatgcaaccacaggtaatccgcaaccacagattgccgttttagatgatggggttttgaattcggttggtcttactaatcctggtgtgaacaaggtgattagtgaaaagttagaaccattgagaaagcaatatccagaattaccgatcgtggctagcgttggcggtgatagtgaagcagattatgttgaagtagcacaaaagctgtcaaattccggcttggttaatgctttagaaattaatgtttcttgtcctaatgtggcccaaggtggaatgagctttggcgtgcatgccgatgtggttgaagaattgactagaaaaattaaagcagttgtcaatattccaatttatgtgaagttaacaccaaatgtgactgatatcactgtaattgctaaagctgccgaaaagggtggtgccgatggcttatcgatgatcaatacattgctagggatgcgaattgacgtgaaaaaacgcagaccactgttaggccataatatgggcggtttatcaggtgaggctgttaagccaatagctattagaatgattagtcaagtgcgtcaaattacttctttgccaattattggcatgggtggcattgcttcggccgaagatgtggtggaatttatgttagcaggtgctaatgccgtagcggttggtactgctcattttaaagatagtattgcttctaagcatattgcagatgccttgccgcaagaacttgaaaaattaggcattgaagatatcaatgaattagttggtcaagtaaaatttaattagagcttgacaaacgtttctaattacagtaactttaaagcaatgaatgtcctttaaaattagtcccgtgaggctagcgaggcaggcttaacttaagtttcgactttactaaagctcctagtctcagttgagattgggagcttttttcatgggcagaattaggaggctataatggcaaaagaaatctgggatgcactagcaatgaagcgtgctttaacccgtattacttacgagatcattgaacaaaataaaggaaccgatgatttggttttggtagggattaaaacgcgaggcgtttacttggctaaacgaattcatgaccgtattcagaaattggaaggcgttgatgtaccagttggtgaattggacattaccttatatcgggatgatcgtcatgatgctagtttaaagcaagatccagttgtcaattctgatcaagttggtgttaatattgatgacaagcatgttgttttgattgatgatgttatctatactggacgaacaatcagagcggcgatggatgctttgatgcacgttggtcgcccaagttcaatcagagtcgcagtgctagttgatcgtggtcaccgtgaattgccaattcgtgctgattttgttggtaaaaatattccaacttctgccgatgaacaggttgctgttaatgtaattgagaaggacggcaaagattcagttgaactgaaggctttaccaaaataaaaagaagatagttaaatatccaaccatttaattgactccagagagggccagaagggttgatttcttttcgtgtacacgggaagactctaggcctggagcaattaaatgcttcaggcttttttgtatagaaagaatagaaaatggaaaatttaaatcttgttaatttaccacattttgtgagtgttgaaaatttggatagtaatgaagtagaagccttaatcaggagagctgagtacttcaaaaaaggcggtgcaacaccacgtttaactaagccagtttatgtaactaatatgttttttgaagattcatctagaacacatacgagctttgaaatggctgaaagaaaactaggtttgacagttattccttttgatccggctcattcgtctgttaataagggtgaaaccttatatgacacttcattaattatgaacgccttaggtgtcaacttagaagtgattcgtcactcacagaatgagtattacaatgatttgattaacttaaaagaacatcaacatttaaatattggtgtgattaacgctggagatggtagcggtcaacatcctagccaatgtatgctcgatatgatgactattcatgaacattttggccactttaaaggcttaaaggttgcaattgttggtgatattactaattctagggttgcaaaaagtgacatggaacttttgactaggttgggcgctgaagtttacttctcaggtccaagttactggtatgataaagaattcgatcaatatggtaagtatgaagaaattgatcaattagtttcaaatatggacgtgatgatgctcttacgggttcaacatgaacgtcatgcaggcgatcctaatgaaaagacttttaatgctaaagcatatcacgaaaaatatggtattaatcagcaacgctatagtgcattgaagcccgacaccatcatcatgcatccgggtccaattaaccatgatgttgaacttagcggtgatttagttgaaagcgataagtgcatgtttgtcagacaaatgcaaaatggtgtgttcatgcgtatggcaatgatcgaggcagtattgcgcggtagacgacttggaggattagaataatggcaacagtaattaagaatggcacagtttatcaaaatggtcgtctaattaaagcagatgttttaattgaagatcaaaagattaaagcaatagggactaacttaacggcagataaagagattgatgcaagtggcaagctagttagtcctggactggttgatgtccacgttcattatcgtgatcccggacaaacttacaaggaagatattaaaaccggtagtgaagccgctgctcatggtggttttactatggtaggggcaatgcctaatgtaacgcctgtacctaatacgcctgagctaatgcaaaaaatggtacaagaaaacaatgaaaaaggtgtggttcatatttttcaatatggaccaatcactaatgatgaaactactgatgtcattcctgattatgcagcattgaaaaaggctggtgcttttgccttaagtaatgatggtcatggagtccaaactgctcaaacgatgtatttggcaatgcaaaaagccaaggaaaataatttgatcattgctactcatgcacaagacgattcgctttttaataaagggatcgtgaatgaaggacctaaagccaaggaattaaacttgccgccagtaactgaattagcagaaacaacgcaaattgctagagacttgcttttagcacaaaaaacgggcgtccattatcatatttgccatgtatcaactaaaactagtgtggaactggttcgaatggctaaggcgcgtggaatcaatgttacctgtgaagtagcgccacaccatattttattaacagatgacgatattcctaaggacaacggttattataagatgaatccgccattgagaaataaggaagatcaagcggcgttactagtgggactactagacggtacaatcgatttaattgcgactgaccatgctcctcatgctcgcaatgaaaaagaaggtggcatgaagggcgcagcatttggtattactggtagtgaaacagcattttctactttatatactaaatttgtcaaagaagaaaaagtcttcaccttggagcagcttttatcatggctctccgataaaccagctaaaacgtttggcttaaaaaatgccggggtacttgaaccaggtaagccagctgatattgcgatttttgacttagaccatgaaactgaattaaaagaagaagactataagtcaaaaggcgttaatacaccatttacgggcgacaaggtgtatggtgaaactgtaatgaccatggttgatggtcaggttgtatacagaagggatgaacaataatgcggtatttaatcctagaagatggtagcatctatgctggcgagggttttggcgctgattgcgaaacagttggtgaagttgtatttacaacagggatgactggttatcaagaagcaattaccgaccaatcttatgccgatcagattttggttttcactaatcctttaattggaaactatggtattaccttggcagattatgagtcacttgagccaaggatcaaaggcgtaatttgtcaccaggttgcccgtcatcctgataattggcgaatgcagacaaccttaccaaagtttttggagcatttgaacattccaggtattcagggaattgacacgcgtgaattagttaaaaaattgagagttcacggtacattacgtggtaagattgcagattcaaaagaaaatgcagaaaaaattgcggcagaattaaagattaagaatgtaactcaaggtgtaattagccgagtatcaaccaagtcaccatatccagttcctggttcgaaacgcaatattgtggttatcgactttggaattaaacacagtattttgcgtgaactagcagaacgtgattgtaattgtattgttttaccatatacagctactgcccaagaagtattaaaccttcatccagatggtgttcttttgagtaacggccctggtgatccagaagaaatggtagaggcaactaaaatggtgcgtgaagtagaaaagcatgttcctttgatgggaatttgtatgggacaccaagtctttgctttagctaatggggctaaaacttacaagatgaaatttgggcaccgcggttttaatcaccctgtacgagagattgcaactggtaatattggttttacttcacaaaaccatggttatgctgtgtctgcagattcaattgacaaggataacttaatgattacccacgttgaagtcaatgatgggacggttgaagggttacgtcataagaaatatcctgcattttcagtgcaatttcaccctgatgcaacaccgggtcctcatgatgaggtttcgttattcgacgactttatgtcaatgattgatcagagaaaggaagaagagcgtcatgcctaaaagaacagatattcataagattatggtgattggctcaggtccaattattattggtcaagctgcagaatttgattattctggtacacaggcatgcttggctctgcgcgaagaaggctatgaagtagttttagttaattccaacccagctacgatcatgactgatacaacaattgcagataaggtgtacattgaacctctgacagttgaatcgatttcacgaattattcgtcaagaatatcctgatgctattttgccaacacttggcggtcaagtgggcttaaacatggctatggaacttgccaaaacaggaattttggatgaattacacatcgagcttctaggtactaagctgcaatctattgaacaagccgaagaccgtgaaaaatttaaggaattatgtaagtcattaggtgaaccagttccaccttctaagacagttaatacagtcgaagatgccttagctttgggagatgagattggctatccgatcattgttcgtcctgcctttacgatgggtggtaccggtggtggtatctgtaataatcatgaagaattagcagagattgccaaaaatggattggaactttcccctgtaactgaatgtttgattgaaaaatcaattgcgggctataaagaagtagaatttgaagtaatgcgcgaccatgatgacaatgcaatgattgtctgctgcatggaaaactttgatccggtagggattcacactggtgattcaattgtcttttcaccaagtcaaactttatctgataaggaatatcagatgcttcgtgattgttcactgcgtttgattagggctttgaaaattgaagggggatgcaacgttcaacttgctcttgacccaaatagctttaattatgatgtaattgaagtaaatccgcgtgtttcaagatcatctgctttagcttctaaggcaactggttatccaattgctaagatggctgctaaaattgcagtaggaatgactttggatgaaattaagaacccagtaacgggaacaacctatgcagaatttgaacctgcattagactatgtagtctgcaagataccacgctggccatttgataagttccctaaggctgatcgcgttttgggcacccaaatgaaagcaaccggtgaagttatggcaattggccgtactgcagaagaagctatgcaaaaagcggtaagatcactagaaattgatgaaaaagatctttactcaccagaagcacacgtagctagtgatgaccaattagagcaaaaattagtcaaagctcaagatgatcgtctcttctatttagctgaggcatttagacgtggttattcagctgaagatgttcatgaattaacgaagattaatttctactttttagatatcgtgcaacatatggtcgaattggaaaagacacttgaggaaaataaagatgatgttgatgtattgcgcttagctaagaaatatggctttagtgatccaacgattgcctctttgtggaatgaaactgcagatgaggtaagagcatttcgggaaaagcatggcatcatcccagtctacaagatggttgatacatgtgctgctgagtttgaatcaaagacaccatacttttattcaacttatgatgctgaaaatgaatcacataagactggtaagaagtcggtgatcgttattggctcaggtccaatcagaatcggtcaaggtgttgaattcgattatgcgactgttcactgtgtcaaggccttgcaaaagatgggctacgaagcaattgttatcaattctaatcctgaaactgtttcaactgacttctctatctcagataaattatactttgaaccattaactttggaagatgtcttgaatgtctgcgacttggaaaagccagaaggcgtgattgttcaatttggtggtcaaacctcaatcaatttggctcatggcttagaagaacatggagtcaagattttaggcactaaagtagctgatgttaaccgtgcagaagaccgtgaactgtttgatcaaatcattaagcaacttcatttgaatcagcctcaaggtttaactgcaactactcatgaaggcgtacttgaagctgctgataagctaggctatccagttttagtccgtccaagttatgttttgggtggtaaggcgatggaaattgtctacaccaaggcagagttagaagaatacttgcaagaccacgttgatattgcagcagaccacccaatcttggttgatgattatcttgatggtcgtgaatgtgatgttgatgcaattagtgatggtaaggaagttcttttgccaggaatcatggaacatattgagcatgccggtgtccactctggtgactcaatggctgtttatccaccacaaaccttctctgatgaagttaaagaaaagattactgatgtcactagaaagcttgctttgactttgaactgtgtcggcattatgaacattcaattcattgtcagagatggtgaagtttacgtaattgaagttaaccctcgggcaagtagaacagtgccatttttaagcaagatcacgggtattgaaatggctcaggtcgctacccgagtaattatgggcgaaagtttggctgaacagggctacggtgatggtcttgccccagagccagacatgatctctgttaaagcaccagtcttctccttcagcaaattatcggacgttgatgcatatcttgggccagaaatgaaatcgacaggtgaagtaatggggagtgatcacacttttgccaaagctctctacaaagcttttgcaggtgctaagatgcaattgcctgaaaatggtaatgtattacttaccatcgaagatcgagacaaagaaaagattttaccaattgccaagagatttgcgcggattggctacagaatctttgctactaagggtacagctgatttcttgcgcagtcatgatttgcatgttgatccagtaactaaagtgcatgaagatgaagacgccaaggataatatcttgaatgaattaagaaatggcaagattgacttggttatcaatacgatggggcacgatattgaaaagaattctgatggcttcatcattagacaggttgccattggtcaaaatgtaccattgattacagcacttgatactgcagatgctttgcttactagcttggagaatagatcatttgctactgatgctttgaagtaggatggttgaatagataaaaataatgcatttctctattgaagtaggagaatgcattattttttatgcaaaaaataattttcacaagtgaactaataattctgagataaataagcgatagatagcattcaatcaagatattgtgaaaaaaatatgtatcacaaactttattatagagccatgagtaagaatatttcactatcttttgtaagcgaatacatttataatctgagataaggaagtgaagtgtttagggggaaataaaaatgtggatttcgtttttattggctttaattccaattatttggcttatttactctttggcaattcgaaaaacgcctgctattaaagcatgcagcattggactattaattactatcgtattggctatactgggatttaacctctctatagttgacactttgacgggtgctttagagggcattctgatggggctatggccaattgtttatgtaatcgtggctgcactgtttacttataatgtaagcaattattcaggtggaattaaaattattcaagatactttgtcgtcaatcactactgatcagcgtattttagttttgattatcgcatggggatttggcggattcttagaagcaattgcaggttttgggacagcagttgcaattcccgctgggatattaattggatttggtcttaatccgattaatgccgccataatttgtttaattgctaatactacaccaactgcctttggtgcaattggattaccagtgattacactgagtgacgtaactaatttgcccgttactccattatcatttgttattactttacaacttgcattattaattattataattccgtttttattggtgattctaacaggtggcggagttaaagctatcaaaggagtgggattaattaccctgatgtctggtttgtcattttcaattccgcaaattttggtagcaaaatttgttggtccagagttaccagcaattgttggttcaatttgttgtattttgactacagttctgatggcaaaattatatcatcatcaagataatgacataaaagagaatattgagaagcacagcgctatcgaaattttgcgtgcaagtttaccatttattttagtgttcgtatttgtggttcttgcttcatcactgtttccagatattcagcatctattgggaaaggtgacgtcttatattaaggtgtatactgggaaagatgcagaactgtttaagattaattggctttcttcaccaggaacattaattttgctagctacttttattggtggattaattcaaaaagttagtttcaagaaattaggacaaatcttaaaatcaacaatttttggattatggaaaacattaattacaatttgttctattgtggctttggccaaggtaatgggctacgcaggaatgacttcagcaattgcggcagcattagtagttctaatgggaccaatatatccattagttgcaccgttaattggtgctttgggtacgtttattacaggatctgatacctcagctaatgttctttttggtaacctgcaattgtcttcagctaaggctttaggcgtaaatagtaattgggtagttggttcaaatatggtgggagcaactgctggaaagatgatctcacctcagagtatagctgttgcttcagctgcaattggacaagatggatctgaatcaataattttgaagcaagtggctaaatggtgcttattgtatttgggaataatttgtatattcctatatggaataggctttgccgtaggatttttataaaaataatttaaataactcttggtgttctgatatatattgatttgcacttgtcatccattaatagtaaatcgcttgcattaaaagcgctttcgttgatagaatgctttttgtaacttttttacattaataagggagacaaaacgaatgagttatttatttctgttcattccggcaataggatggggtcttatgcccatgtttgttgctggtgtcaagaagagtaacatttaccaccaaattttaggtaccgttcttggtgcatttatctttggtgctgcagttactctcattaagcgtccatcttttaatgcgactacttttattttagcaatgttagctggtgctgcttgggttattggtcaagttggtcagtattacagttattccaaggttggggtttctgaaactatgccaatttcaactggtttgcagttgatcggtgtgccacttgtaggtgtgttgatctttggtgaatgggcaagcactcaagctaaattgtttggatttttagggatcttagctttagttattggtgtagcatttacatcattgactgacaaaggtacatctgaaggtggaaaaaagaatcagaccactacaatgattgtgctggtattgactacacttggttacattacttcaagttccattccaaaggccttgaagggtgacagcataatgattttctttgctgaaaccattggaatgttggttgcagcaattgtttatttaattgcaactaagcaaacacaagtctttaaggaaaaagaaagttatcaagtaattcctgccggtgtgatttacgcaattgctgctcttgcatacattgtttcagttaagatgaacggtgtaaacctagcctttgttatgtcacaactttgtgttgttatttctactcttggtggtatccttttcttacacgaaaagaagacacaaaagggtcttgtctatactgtgatcggtttaatattaattgttgccggtgcagttttgacctcagtattttaatgaattttaaataaatattgaatgaactccaacatgataattgttggagtttttgagtaaaaaaattcatgaataaatataaaatgaattaaaatataagtagaagccaaagagaggatgatttctatgagtgataatacagtatacgtgatcgacggtcgtcggtatgcacgtaatggagaaattgtcgaacataatgtgcatgtttatagttcttatcaaaatctgattgctgcatttaagccatttttggaagtttcaaataaagaagtgcatatgaatggcaaaaatgagatgcttcaggttagaatatatgatccatcaaatcaatttttgacaaaatataaatttgatatttatgaaaagaaaatagataatttctttccaagtactactgaacatatttagcaaaggaatgatccgatgacttttaacaaagaagaaaaagagcaagctttaaagcggctaactgatgaggaatataacgtaactcaaaaggccgctacagaatatccttttaccggaaaatatgatgatttttatgaaaaggggatttacgttgatgtagtgtcaggtgagccacttttttcaagcttagataagtataatgcaggctgtggttggcctagttttactaagccaattaagaaattaacttaccaccgcgatcaatcgcacggaatggagagaacagaagttaaaagtcccgaagctgattctcacttaggtcatgtttttactgacggcccagtggatcaaggtggtttacgttactgcattaattccgcagcattgagatttattccatatgatcagttggaacaggctggctatggtgaatataagaaaatatttgaataaaaaatacggcagatacttaaaataaatatctgccgtattagtttatatattaaaaattatttctcatagaacttaatttcagtattggccaaatcaactgtataagtttcttcttcaagtggtcgtttagtcattccttcatcagttgagtagatgatcaaggccaacttactaccagatggaagagtgtagtaggtaggttgaagcaagaagtctaaatcgtagaacttgtcagcatcaatcttctcaggtcttttcatgtccttatagttttgtaagttcatgtgagccttagtgatcaacttagccttagtcttcttgtccggcacaaattcttgcaaagtatcagtgccaaatctatagccaagttcttgaccgccgcgcattaagaacttaggtgtagcggttaagcgtcttctttctcccaattcaactaaagcaacagaaatttgtcccttaggtaagctgcctttaactctaacttttacttcaggacgaccgacaatcgtagttgggtgaataaattcgtctgtttcaaaacgcaaacttggtttagcccatttttcatcaccacagatgaacttgtatagccagtcgctttctgagatgtcagccttcttaaattcaatgccaccttcatcgacaaatgattgttgtgctttgccattgccatcttggaaaagctcgccgtcatcagttgggtagtaggttttcttttgacctaattcatttgaccaatccttttcttcgtgccacttgtcagcttgcaagttgtcctggatcatgacggttggccattgcttgtaagcattgttttcaatccctagtaattcatgtacaaaccaaaggttcatcaagtcagtaaaatcaatagaaacaaagttgttcatattgtagtgaggaccttggtgtaggaaaagatgatgcttcattggcatttttttgactagttgccaaattttataaacattctttggcttaacgttccagtcatttaaaccgtgaacagaaatccaagaacatttgatgccgtcagcgtgatggcggtagtttcttgcttcccaaaagttggaatattgaccggtttcacggtcttcttttgttaaaagctctttttgcatcttgtcgtattccggtttgatcttcaagtaagaacctgcatcccacaagtttgattgacaagtttcagccagtaaatcaaggtcttcaccttggcaggcttcgggtgcgattaccaaaccgtgttcacggtaatagtcataccaagaagaaatagcagcttcagaaaccacagttttcaaacctttaaccccagtagtggcaatagcaatttgcaaagtgcctaaatatgaacgaccagtcatcccgatattgccattgcaccagtcagctttggtttgaacagatctagtacggtcagtgtaagcaatacgatcgccgtggagccattcgataactgcagcagctgattcagtttcttcaggtgcaccagtaatacgaatcccatcactaccacgggtaccgattgctccagcaaaaacactggcaaaaccacgagcaagcatatactcatttaatggataagaagatttatgtactgcttcttcggtagctgggtggttagagtcgtctggctgctttgctttaactattggtgaatgaacatattgtggatcattccaatcggcggcatcagataaattttcatcaacattatggttacgcttttcattagcgataattccgccgaaatatggtgaagcagtataaagggcaggcacttttaagcctttgttagtttcagctggtcggaaaacagtaacttgaatcaagtcactcttaccatcatgatcagtatcaagatcagtttcaacgtaaacaacttcacgaattactttgttggtatcgaagacaggaatagctttgccattgaaaaatttaaacttattttgtccccagaattgagtaaagtaccccttaccagccattacatcgagcaaaatttgaccgtttttggcgcgagtattgagcaaacgataaaaagcagagattaactttttgacatcagaaatgtcttggacaaaaggtaaagcattcttttgcataaagccggttggatcggctaattcgtagtcataatgaacatgatagccaagtaattgtaaggctacattatagaattgagcagtaccaattgattcaggctttccttttaaaaagtcagctaaagtttgctcatttgaaacagcaaattcagataattttgttgtcttagcagcgtcagtttttgcttcagcaattgtcattttaacgagcttgcccagcaaatcgttaaaattccagtctgcataatttttaggtaagaaattgatgtcgattaattcttttacttgttgatcgaagtcagtttcgacataagcgtattggttatatttcatatttttctcctttgcagtttaattactttctattttacttttaattgtggctataaccaatagatatggaagttaataagcgaaaaatatttttattttggtattcttttctttaaaatggacttaaacaaatcggtgatgctaaatgagaaaaaagttttcacttgtcttgctacttacaacgatatttacaatttcgctgacagcttgtactaatcagaataaggttgatcatactaaaagtcagactaaaatcacctcaacaccgacattatttttccacggtggtggttcgtcatatcatgctgaagaacacatggtggcagcagctgagaaagctggagtcacgaactcagtgattagagctgaggtggcgcctaacggtaaggtttctttgagtggaagttggaaaaaaggtgccaaaaatccaattgtagaagtcaattatgaaaataaccgtgagttgaacttttctcgacatggtgtttacgccactaatgtagtgaaggctctgcaaaagcgttatggtattaaaaaatgagcatgttcggtcattctttaggaaatatttcgatcatttattatatgctgcaaaatggacgtaaccggaagatgccacaattagtcaagcaagtcgacatggcagaacattttgctggtttgaactttagccgtgttcccgcctcaattcgtcaacctaaaggtttaaaattgaattctgccggaaaaccgaacaaaatgaatgctagctatcggaaaatgacgggtgtaagagaaacatatccgaaaaataaagttcgtgttttaaacatcattggagatattggtggtcaaaccgatggaacagtacccaatgtatcatctttgtcattaaagtatttagtggcagatcgtgctaaaagctatcaggtagtgaagtttactggaaaaaatgcacgtcactccaagttgcatgagaatccaaaagtagataaagtattaatcaaattcctgtggaataaataaagttagtaataggcatgcgaacgtatgtctattttttgtgccttttcttaatccaattacttgaattataaaataatgcgtgtataatattcatctaattaataaagaaagggcatggttttatgaagctattaaagactaaaatcttaacaattctgtgtggcttgctaacattgaacggcttagccatgttgttttcaggattgattatccaaatggacgaagttgctgattttgattcagcccaaagtttagcagttgctaattcgactaatgccattattttggcaggaattattatgattttgctttttggggcattgtttttcgatggttgggctaagctcaagaacaggcatgctaagcacgttaagttagtttaatagaatagataagactagctctgaagtgagctggtctttttttgcccaaaattaaagtcttctttaccgtttttttacttttgcatgtgataatgagccaaaattaatcagggggatagttatgggattctggtattattatgttttgccattagtgacggctattttattcgtttggctaggaaaccgagttatggtgactaaaaaatggattagcataattttttactcattagctggagtaggctatttaattgcatcggtttttgctgttttttatatctatgcaacagtagaagaaattttaacgccagatattttaacaaaaataggttggcattatttttggagtgataattttatttttcttcttaccagcactgttctattaacaattagctattttgtactaaaacgtggtagattacggatgaaataggatgctcaaaaatgataagattatttttggaaaaaatagaataatgatggggtgaaaaaatgactttaccatttaaggcagttgctgtagatatggacggcacgtttttagatgatcgtaagcagtttaatcacaaggaatttgatcaaattttgactgaatttgaacaacgaggagtacattttatcgtggcttcagggcgtccttatgttagattgaagcaggactttggcaagtttgccagcagaatggatttcgtaactttgaatggctcgagattaatcatcaagggtcaagaagctggcagttatttgcttaatcgcgatgacgttttaaagctaattcatgatgtacatgtgaaatatggtgaaatggctacaatggtttttggccgagatattgcatatttgcatagcaatgttgaaaaagatgaacgcgactttttggcttactttgctggtaatagcactgtaattaatgactggaatgacttaccagataagatttatcagatcacatttggaatggacagttctaaggctgcagaaattgaacgagattttaattctaagcacgataaccagatttctgctttttcttccgctacttttgccattgatgttaacacacaaggtgttaataaaggcgccggattaaagcatctcctagaaaagatggggatgacaggggatgacctgattgcctttggcgatgggggtaatgacatcgatatgttgaaatttgccaaatattcttatgcaatggcaaacggtatggacaaggtaaaaaagcaggcgaaatatattgcaccggccaatacggagaacggtgttttcaaaggtttgcaaaaatatttagctgaagataaaaaatagcttgtaaaattaaattaatatgatatagttttaattaacttatagaaatagaggaaattgccatatgattcgtttactgaatctctaatatttgatttgttgtttagcaaaatactgtctttgcaccttgtttagtgcacccattttttgcttgcataccaagtattagcagtagatgaattgagggtggttttctttatcgaaatcaacctttatttgttgcactgttaataggatgtgagcatccagaacaatgctttttctttgcgacaaatcatgttagagatttttttgctgattatacgtttttgtcaaaaaagaatgaggaaaataatgggtttaagagattatattaaagctaaccgtcagcgggcaatgttagttctgtttttgattacgctaacgcaactgacaactacaatgtacacctacttaactagtccgcagttaaatgcaattgcaagtggtaaattcgaactgtttttggaattaatctttgtacaatttttaattggacaggtctgcaatgtcagttttaattggggaagtttacaaaataccaaacaaacacagacactttttcatcaggtaagacagcgaattatacgacattattatcagcagcctgaagacaaagtttcagagatggaaaatcatttgggaaatgacttgcagttagtgcaagagagttactataatgtttacttctattttgtttgtgacttaatttatattattttaactattggtacgctgtttacctttcattggatattggctgtctatacgttattagttactttgcttgcagtagtagtgccgaaattgactgaaaaatataccaatcgagcaactaaagctgtttctatccaaaataagaaatttttgcagttgttagaaaaatggttcaagggtttagatgagctgcgacgctaccagaataaagttattttgaaaaaggtggtgggacaacagagtcagaaactagagcagagtgaatatcagcgagataaattgctacattatattagcttagtgtctgcgatatttaatatagctggtcgtgttggtgttccatttattgctggaattttgtttttcaatcatcaggtaaatttaggagcgattctgacagcgggatattttgccaatggaattttttatagtgtagatagttgcgtgaacagatatacgcaattaaaatcaacgaaaactttgcgggatgatctggctaaattgcaaaagtgtttaccagaaaaagggtatgattctttaaaacaaatcgctaccgttcaaataaaaagcttgtcagtacaatatccaaatggtgaaagaattacttatcctgactttgaactgaagaatggtgaaaaggttttattgactggtgattcaggtacaggaaaatcaactttattaaaagttttgttagggcaaattaagccaagtacgggtgaagtaatctattgcgataaaacaggaaaaaagatcaaacctgatttacgtcaattaggttatttggcacaggacttattgatctttcctggcagtattcaagaaaatattactatgtttaagcctaagcttaataaaaaagctgtacaagtgattcataagacggtttttgatagtgatcaagcgcgtttgaaaaatgggatagagacacagcttgatccacaacaggaattgctgtctggtggacagaagcaaaaggtagttttaatgcgagcgttgttgcgtgagaagccgattctgtacttagatgaagcaactagtgcaattgatcaacaagcaacgaaaaaaatcttccaaaacttaatgcaaagtagagcaacaattttggccgttgcacacaatttaaccgtagaacaacgagcattgtttgatcgtgaagttcacttggagggaaaataatgagtagcaaagaattatttaaacttaatccaattaaattctgtctggctatgggactacagattattgcagcagttggcgaagtagttgtagcttatgtgttaactttgcaatttgatgctgccaaaaatagaaacttgagtttatttttgacttggacattaatccagctgtctagctatgtcatggtattcttattctataatttggcgggaatcgtttggcaaaagttgattcaaaattacctgcatttaattcggcgagaactaacagatcattattttgccgatagtcaaaagcatgcggttagtgcagtgcaaaatcggatgactaatgatttgaaactgttacataatgactatttagattcgttccgctatatggtagggatgctagccggtattgtcggtgtagcctttagcttggtgacttttcagtggagtttgttagttgcttgtttaatttttgccgcaattcagatttatttacctaaattactggataagccattacaaaaagctactgaaaaggtatcagtagctaatcgaaagtatttgaagactttaggtgattggttaattggcttatcagaagttcgtcgctatttggctagcgataagctttttaagactattgctgaaaattcaggacgcttggaagcagcaaatattgagaaggaaaaagtagatcaggaattagattatctgaatcaattggcttattcattaggagatgtgctaatctttcttttaactggatttttggtagtgaataattgggctgcttttggtttgattgccagcattggcaacttcaatggagcactatttggttctttgcaaggagttgctaattatggtggaagaatgcgagcaacaaataaattgcgagaagagatttttgtagctagaaagaaaattcagtctgaacagaaaagtaatttagaacaagcggttagtttttcaatccataatttagctatcgattttagaaacggtgaggccgtgactttcccagatttccaagttaaagctggagagaaaattttactaacaggtgattcaggtacaggaaaatcaactttactcaaattgattttaggtgaattgcaagccagtcgcggcaaatactttaatcaaaagggtgaaaagattcaacctgatttagctgaaattggctatttgccgcaagatccagtgttattcccagtaacgattgttgaaaatattacgatgttcaattcaaaactgctaaaccgagttaaatcagctattgaaaaagttcaatttgcaggagatattgctaagttttcggctggcattgagactaagattgaccttgatcaattgaatgtttctggtggtcagaggcagaaaattgttttagctagaagcatggtgcaccagagcaagttgattttgattgatgaggcgacaagtgcaattgatcaggcggctacgatgaaaattttgcgtcagttgactaagacggatgcaacgattgtattcattgctcacaactttaatcaagaaatgcatcaattgtttgatcgtgaaattcatttaaagaaataaaaacaagctcataacctcaaagttacaggttatgggcttgttttattatagccaaatttgttcgaaaatatcttctttaaaaccgcaagttaaattactgtcatcaacgactaatggccgcttgattaacttaccattttttgacatcatatctgcagcttcttcaatcgtcattgttggcactttttctttcaaattttctctgcggtaatcttgaccgtgtgtattgaagaaatattttagaccacgatcttgatatttggtcatccattttaccaagtcttcttttttcggtggctgttcaactaaatcttgaaattcgtagttgacctgatggtcatccatccacttgcgtgctttacgtgaggtagagcaacgtttataaccataaaatttaatcattattttccgtccttatttttgtaaaaattttctaaaaaattcaatttcttcatcatttgcgatatcagctagctcgtctttttgatcaacaaagaacacatgaccgcgaggattgtcttcatcaccataggatttgcagatggcgtgaacaccgcgaccgagcaagaagccaaagaaggtaaattgcatgtcatgcaaaaaatccttgttagccgtgattaaaaaagtcggcaagaaattgtgattgatatatttttcaacgtcgagttgttcatgatacttgttaactgcatttttagtgaagtaggcgctagccatgccatctaaattgcttggggctaacatgaaggaagcagcacaattcaagccgacagccctaaattttaagttcaatggtttgtaagaaaataacttggcataatctggattagtcaaaatagtgacatactgctcagccatttgaccaccggcgctgtcgccaacgataaaaacgttgttgcgatctagacgatattcttcagcgtgctcatcaacccaatgcatgtagcgatcaacatcgtctaattcatcagggaattccgcgttttctggtgcaagacgatagttgggattgatgaaagcaaaaccgcgcttagctaaacccattccataatattggtagatttctttagtaccataaacccaaccaccgccgtgaatattgatgatgacagggaagggagcttcgtgctttttgggtaaataaacatctaaagtatgcatctggaccataaggcagattatcaagacgttcaacttcagggatgtcgtgaggcaagccactgtcacgtttggtgtcatgctgatatgcaccatctctaaagtcagtaacaaactttttgattttatctttaagttccataattgttctcttttctagtaattatctatgttaactcaattatactttaattgaatttgaaaaaataaaaacttttttgaaaaatcctcttgcattttaattaacgtttccctataatagtttatgttctgttgaggacatacaaacatacaagatggtctggtagctcagctggatagagcaacagtcttctaaactgtgggtcgtgggttcaaatctcacccggatcatataatcaagcctgtaagtattgatcttacaggctttttgcataccttaggtatctaaaaggtatctaatgtgctaaatttgatttaaaacttcttcaatttgatcatcagattgctgacgaagttcatcaagcatataggcatatactgaagctgtcatgctcatagaagagtgtcctaatctttttgaaatggcatagagtggaacacctttaaagagtaaaagagcaacgtgagtatgacgcagactgtgaaagtgaaaatgatttttggatatattaagcttcttaagctgcttttttaaggtctgattagccgcagtcgttgtgataattttgccgctttgagtcataaatacaaatttttgatgattggctttaagttgcttcaataaatcaagcaaattctctgagactcgtataactcgtttactactttctgtttttggctccttaattttaccgtcaagataactatatgattttgttactttgataagatgctttttaaagtcaatatctgtccatttcaaagccataatttcgcctattctcatgccagtatatatcgcagtaatgatcatatatctgcttatgtaggtcggcttaatatttgattctagagattcgagtaacttctgcacttctttataatttaaatattgcactttatggctatgtgaatcattccaggttaggttaactctatcggtgaaattattggttataagcttgtcagaaagacaatcgtgaacaaatgcttttatatatctattaagaagtcttacagttgtttttgcatgatttttaccgtagtcgtttaaaaagctttggtatcgttgacgattcattttagttagtttgacattaccaaaatagtttttaacaatagtaattgagtaattgtatcgacgctgggttgtagttgctttacctggtatcttatatgtattagtgtattcttcgtatgcttgtgcaaaggtggggttttggtcagatattttgttatcatctttagcaacttccatttcgttagcccattttctggctgcagatttagttaaaaagccctgttttgttttaaaccgacgcttaccttggtcatcataccaagatacttgtgctcgccacgtagcgcctcttttttcaaaatgtgccatattcattacctcatacgtttacattatttatgcattaattatgcattatgtataaattacttatatgtgacttaatataaactcacctacttaatttgagcaggcgggtgtttttgttaaacttagaatatttattccatgaaatcattcttcaaatctatatttgttaaattcctcttgcacttgaaagtaatcctgtgtacctatacctttagcaaaatctaaccaattagcagtttgaaaatcgttacccaaagcgaaatattgtctgactctttcacgtattaaaaaagaattcgctccgtgttcactgcaactatgagcacaatcatccgttttgtagtctccttgaacatctttgtcgtatatcatatgtcccagttcatgtaggattacgtttttagctttctcgtcgtcataacttgaattaactatcattacgtctggcttattatcttctccaggtatgagtaaacctgggcaatgtagaggagcaaactctaattttatgtttgattctttaagtagccttttaagttcagtgtccataatgcacacctttttctatttttcattgtaaattctctttaaaatgtctctaactagatctttgtcatggtcatcaataggcttaccgtcaaaaaatctagcattatcaatcattttatttaaatcggagtctgtaatttcactgttagtggaggaaggagaagggttattagttcgtccaagcagataatcagtacttgtgttaagtttttccgcaaaggtagctattgttgaaatatcgggttctctttttccttgttcataattagaatatgttggatatgggataccgatttcggaaactgctctttttcttgaccaccccatagcttttcttgcattgataagtctatcgctaaaaatactcataaaaatcctcctaaaagctaaataattatcctatttgactcaattctaaaattaaatattcaatttgaaaataattatatccaaaaaggataaacatttattgacatttatccaaaacggcgtattataattcttgttaagaaaaatattcaaactgaataataagaaggtgataatttggttagagcaactaaagaaaatgctggaaagattttaaaaagttatcttagagagcatggaattaagcaaaactatgttgctaaaaaagtaggaatcagtagcgctaattttagcagtcgactaaatggtcgtttaaagtttaatgcagattttgcgctaacagtgtcaaaggctttagatatcgatccagagatttttttgaaataaaattattcaaattggataagttgagaggagcataaagtggagaaagtgtttgaaggatcaaaagcttttttaaatattccagtaggtatagcgagagataaggaattattgaaaaagcccaaaactatcctgttaatgggcgaaataatttcaatgctcaatgtcactggcgagttttttatgagtaataaaaagattagtgaacgattacaagtatctactcgtactgtcaatgattacctcgatattttggaaaagaaaaagctgatcatacgtgaaaaaatagtgaacgatgaaaataatgcaatcatcggtagaaaaatacgtgctggtgcagccctagtgaaatgcatttcactagggtggggaagcccacttcatgagggtagtgaagctcacttcacacccctagtgaagcccacttcacataaaaagaacagagataatagaacaactaatagaacagttaataaatcttcttcttctagtttctccttagaggatcaaagcaacagtattaaaaatcaaaaatccgaagaagaagataaattaaataattctaattcacgaaaagaagagcctcgaagagaaaaggtttataagagattatttcaaattgcaagaatgaacgatcaatggaaaggcacacgtactattccaacgccagatcaaataaggcagctgcgtatgttgttgtaccaatgtgattatctttcgcttgatgcagtactgcagacatttagtgaaaagatgagagcagatcaactatttgaaccgtggaaatacgtattacagttgatgcgagataagatagcagcacaaaagaattatgaaagctggggataaagatgcaagaagatatgtctaacgcattaatcaacattccaagtcttacaagctttgtaaaaagtattgtcaaagaagctgttaaagaagataaaaaagatttaactggcaaaacttggaatatcaatgagtttagaaaatactgttgtcgaggtaagggagataactgggtaagaacctttattttcgatgaatttccagaagtcgattacaagaacggaggctttgtagtaaatcctagaaagacacctgaaggcaaaacaacaattatttttgctaaagaagcttgtgagtggatgcaacaacatcagcatgagattgattggaacgcaaaaatcactagttagcataaatgtatagagattacaaacaaataacgccctacaagtagtagagcgtcatagatttaaaacggattggagaaaaaataatggaattaacaggtaaaaaagaaaattttgatgaattcttagtcaaggtagatgagttaggctatgctattggagacgtactccctaatagctggacattaaacttaactgatgttacaagattgctaaatgaaatgcttagtgagaagcacctcaaggttaaacaagaaactgtaacgacatcggataatttagcagttcaggtcaaaacaattttgcaagatagagatttgcaagtatcagctagtttagatacgatactagattcaaataatcaagttgaatatatgcttaactggtggcagtggcggatcaattgtcaattagcattgatcgaagtaatttcaggattttatgaaaaagcaaatgtagaagactagttagcatttgctagaacagatttgattagggaaataattaaatctgtctgttgatcagttaagtcttctggtagaacatttaatatcttgttttgttgaggtgttaagtcaatttctttagaggtatctactaaagaattgacgctgacgttaaataagtcggctaattttgctgtgttttccttgttaggggtattcacccctgcaagccatttgtagactgtaatcggcttaatattgagcctgtcggcaactttttgaacagataaactactattttgaattaattgtttaagataatcagttctaaatttcaaatctgggtcatcagttttttcagctaattgagataagaaatctttggttggctgatatgaaggatcaagttcatcgggtgcaacatgtaaggctttagcgattttaaccaagttgttttgcggaatggcaccatttcctaaataatagcgattaattgatggaatagagattccagttagcgccgccaagtctcgttgagttaatttttgattgtataaaattcttttgagattggcgctagtaattgcgatgatggattgcttaagtttatctttcatgatatacccctttaaaaatttaaattttatgttgtaaatcattattaatatatcatttttgcgatacttttgtataagaccgcaagatattgataaagaaagccttaattagatggatgtgaggttgtaagaatgaatcttaaaaataaaaaagttatacaagacttgcttaatgacaaaattgatattcaagaaattgaagatagattgtttgtcattgcgtttcttagcatggcagataatcttgaactagatggacaacgacttagtagtaagcagaagctagagttaaacagctatttagcaggggaagcattgggcttaatgggaaacagtccagaagtattaagcaatagaatttatgacccagactatctggcaaaaatgggtaaattgattgagaaagcttttgtagattatatgaatatgtcgggggttcatgatgaataagtatgatttatatccaggaatgataactactcctgcagaattgtctaaaattttcacttggcgatttagatatgatgtgcttggaatgcaaccattggatagcaatagtttttatgttcgtgttaaacaacttaatgatcaatctattgacattaaagctaatcaaaaaattaagtatgctggcgagggaaaatggctagtagtagttgaaaggagctagctatgaaattatttttaggcatatatttggcttactttcttacgagtttgatttggatagcagtagtctttaacaagacagacgcagaagaaaagtatgttaatagagttaccaaaagaggcaaacaaactgtgaattataagtctgtctcgcttaaagtaatgaatgttgatatgaatcaaggatgttctatgcttgaattattatcaaatgatcatcattcttttgaggacgatccccctatagtgattaaggcaatcgtacctaaaaatcaaataaaagtttttaaggctaagcaagcaaagcaaattgaagccgatttgcaagtagttatcaatactagaggtaatattcctcaagttcagacaaaggtaataagagtttattaatgctaaggagaacgctatgtttttagtactttcacaaacagattggttttggattatggtttgggtctttattcttgcttcagcgttccatctttggaagtgggtttgggtagtcttcggaatatacctgatttttccagctctgttaacactgatggatggtttatggagaattgcgctggtaattggtgtgatttttctaggaattaaatgtgtatctatggggatcacttggattaaacaaaaaataaagcagaacaaggaaacaaagaaggtaaaagcatgactaagataattaggcttcatccatatggttcggagcagttaccaattttaggaatgaatgaaatggatcttgaaattgatgatcaaatttttatgtctatgtatcatgaatatttagctcaaggtggtactgaaaaagattttaaagaaaagcaggcagcttatattagtcaagcaatgagtggattggaaagtcttgtgatattaagaatacaagcgataaacagactgtttacaataaaaacgatatttgatataataaataagcaagggctatgtaattgcccgtgcatagcaagttaggcgcaactttatactcaatccccattgatgctactaaagttactcctactgccatttttaatccgttagggtcacctagcggtttttttgtgcttaatgtaaaaattatgtatattattttttgtcttgaaatatcgtaaaaacgatatataatataaatatcaggaaacattttaaaagaggaggagaaaaaaatgattaatcaagttgtaattgacggctacattggaaaagaattggagttaaagacaacccaatctttaaaaaagtatgtagcctttactatttgtcaaaaccgttatagcaagattcaacaagactatattggtgaatggcaccatgtaattgcgcggaataaagtggctgaaaatctcgttgctaaagtacataaaggcttaaaagttattctagctggtgaacaaaggactagaagctttattgataaaaatggtaataaggttgcatatgaatatatctgggttaattcatttgatgttttaacaagtcaaaatgaagagtctacaaaagctattcctcagaattcaaatcaagcaaatgatgaagagccagaagctgaccgtaccattgtggaagcaaacaaaaaagataaattggcagaagaaccttttggaagtcagaaagaagtacaactaacagatgctgatttaccattttgatggagataatgtgattggtgagtattggatgacaaaaaaatcagtaaaaaatagacgctttagcgtattcagagtggaaaaagaagtttatgaaattctgacgatagatgggtaccattactggaatattgacgggttatttataaaaaatccaaaaaattttttgtctctaaagtcttataaatacaatactggatataaaaaagtaactttttatcgagtaagtgagatttatgatcaaatttatttaggctttggatttgaagtaaatcctaaattaggacatcgcaggttattgtgtaaaagaaaatatcctgaatctcatcataggaaaaagccgctaattgatgttagcaagtaagatattatgatcagttcatttatattagaacattttcgatacatagtgatcgcatttggagcggggaatttattcataattattcttatggcaatatcatctttgccaagtttagcaggcacaaggtttgctaacttttttgaaaaattggatgaattagtgacagttctgctatcgattcttggaattattctatggatcatgattttatttatcggatattactggagctatttaatgtaaaactagggcgtaatttaataggtaaaatgcaagttggaatgaatattggttaaaggagttgctcctcttttgaatcaaaaagttgctattcatatatatccctatttttaatactttaatactcaatacttaatacttgcaatgaaagttcgaatctttccgctctaatctagtgaggaaaaatatgtataagttaataacagtcgcagtaggtatttatattgtttattacgtctggcgagcgtattcaaacatgaaaaatttgaagaaaaatatggatgataatcctaaagaactccttattaggtatgatagtcaaattaatgatttgcgaaaacagttaacagaagttaatgaaacaatcgcaagaaatcagggcttcccaccaagtttttccgttaatagggggcttaagaaagccaagaagcaacaagaaaagctactgcaacgaattacacaaaaagaagttgctagaagcaattatttgaaattattgagaagctatcaagaaggaaaaattgataaagcagcattgaagaaatgggtaaacgaaaatcagaggagatgataaacgtgaaaaacgtgaaaaagtttagcaagtttgctttaactgcgttagctgtgacaggagcaattattgtggcagtagtcgtgacaaatcaagtaaaagaggcaaaatccttagaatgttaatcattaagaaagtcggtacaattattgatttttgatcaataatttagctgttcaactcagctatttcttttaggactggtaaacagtccattagtacattgaaaacagaataagcgtcaactatgctttgcaacaagcgtaggacgtgtgcatgactattgagccgactcaataggatttgcaagacagagaattgaaggcacacaaaggtggaagaagaaagaatcacacccgtcaagatgggaatagccgtccatcaacaaagattactattatttttggcttgatgataagtcttagtttgaacgaaattttaaatttaaagtaatagtaatggctgtaataggctactaaaagataagcatacattctttttggctgttttgacatgtgaataccttgatgaaaaactcaagagtaaataagaagtcggaatgtgatcaacaatagtaagtgagtcgataaacttaactctttaagtgttgtagtaactgaagggcaagaaagagtctttgattaggattgataagaggacagcttgcggaatgcgtgaagcgagaggctagagataggtgaagctatctgctacgtactgtacaaaagcttacagtttggtggctaactagaaaaccatcatcgttatcggtcatagcgcaaaaccgttggtaattaaagagatcacaatttaaatgggattaggatgaaaaattatgaataattttgattgcgttgatcgattggttaatgtaatgaaaaaattagatgttacaagattaacggcggatgagtatgtccgttatcgcaatcaattagcaaaggaatatcctaaagaattcacgccaataaggcgaaaagaaacattagcattacgtgcattactttcccgaaagaatgatcaagtgaagttatcttttacatatgatcgttttggaagatgtacgcaagagtatattttaaaataataaaaattaacggatatcccgctgctataatgttgcgtatgtagtataatgaaagcaggtgagagcggggaaaagttagcgagtaatttaagctgaattatttgaaggaaagaggagcaaattatgtttatgaaaaagaatgtattagtaagtttatctgttgcaacattgttatcagttggagcagtaggtgttaatgaaataaatggtgttgctaataatacaaatgttgtacaagcagcagtaaaaaatggcaagcttactcataatgcctatatttataagagtaatggcaatcgttatggcaagaaagtattgaagaagggcaaaacagttaagattctcggtacaaagaagatttatggtaagaaatactaccgcattggtaagaatcaatacgttaaggttgctaattttgctaagaagaccagtaaagctaatacggctagcggtcaatattatttaacccacaatgcttatgtttataacgctgaaggcaaaagaatcaagggcactgatactttaaagaagaaccatgtctttactgtagttggtgttaagacaattaatggcaaggattacttgtccttaggcaatggtcaatatgtgaaagctgcaaatgcacaatcaacctcggctgaaggtgctaataaccaagtaaacaataatgctacagatactgcagtaggtaatactactgacaattctgcaacagcagaaaagaagactaataattctaagaatagtactgcaaacgacaataagcataatagctcaaattctcaatctaaaaaacaagaatggatcaaagaaaaaggttatatctactttactgatgaccaagtatcccaaattcaaaattatttatggcaaaaaatcaatgcttatcgccaaagtaaaggttatcctgcctacaagacaaatccagagttgaataactttgtaaatcgaattatgcaaaaaggtactcctgaatataacgctttaggtgatggtattggtacatttcaaaatactgataccttagctaaatttttacctaaattaaaggcgttaggaatggatagtgcgagaagtcttaatgatttagatgccttcagatataataatgtgaaacagcacttcattaatctaaaagaaagagatcccaagaaagtcgcagatgaaatctttaatgcttatacaagagaagaagacaacatagacttgagaacacttgaaggacataaagataaatatgcttatgctgctttaaaagttagattcaataatgagggagattatatcgatcacggtttggaattaaactttaccgttgtaggaagttattcaccagaatggattaaggcttgggaagctgctaagtagaaattagaaataaaggttaattagttatgctaattgcctttttttgttcctaaaaatgaaaataaaaaaaagtagattagctattaatcaacagcgaaaaagtgataaaaagaaaaaaattggtacaatagtagctattgttgcactaattttaatcggggttgcgatttactgtattgcaaactttaatcatcttcaaggaaaagctgctaactatgtagcaactaatcatttgtcgagtcaaagaaaaaacaaacagaagaaaaagccaagttttaatatgaaggctgtccaacctgtatcacctcaatctcttgccaatgcatatcagcatagaagagattatcgagctgtaggacagatagcaataagagatcataatgttctattaaatatctatcgtggagttggtaatgtggaactgaacttaggtgcaggaacaatgaaccaatatcaaaagatgggtgaaggaaactacgctttagcaggtcataatatggatgatgggcgttcgttctttagcccattatatactgcaaaggtcagaggaaatttacctaatggaacaacaatcttactaacagattataagaaagtttattattacaagatcacatcttcacaatttatttcagtttataatttaagattagcttggaataataaagagtttaagaaaaaaccagtgatatcattgtttacttgtgactggacaggtcaaggcagactttttattcgtggtaaatacactggttcacaagattataagggagcttctaagtatgttagaggctcctttaatttttagaaaggaaaatgttatggcaaaacaagtttttgtagatttcgaattaccagaagctatgcttgctgatacaaataaaattattaaagagaagtttcctgcatggctagtagatagaaaagataaccgagtagcctcagttcgaattctgtgggctggctggttattccttaagtattcggaaggtttggctagcaagtatgatggacgttttccatatgtagcatatactccttatacagcggtagatagaccttatgcttttcaaaccgtaatgttggaaagtgaatatattgatgcaatggaaagaatgagtcgtttgtatccagatgtctttgaagataagactaaggataagaattatttcttggcaattcttggttatgcttgcttaagagagttgtatgacaataatattgaattacactataatacagaaaaagctaatgatatggctgatagtgaaaatgcacaacttgattatgcatggttagaagatggtacaaataagccattttctatcaagatcaagcaattatcaaaagacaagtaattgccaataattatatattattagaaaacacctacatatgaatcaatgtttagatttgtgacattgacaaaaatgcaggtgtttttttgtttgttaaattaaggaggaatagccttgaaaaagctatcaaaaaagcaaactagagaattgctatctgcattaggtgtaacagcaactctaggtagtgtgggcgtaggtgtagcagtcgcaaaccataatgcaaaccctaatattgttaaggctgatgcagcagctgatgtgaaatatgtgagtgatgctacttttaaaaagggatcagatattgcttttgatatttactaccaagttccatacaatgtagatctaaagaaattggttcttttcgataaattggagccagtgtttactcataataaaaccagagtttttgatggtaacactgatgttactgatcaatttacggcagattttgataaggggacaaatacaaccaatatgacggctaagaagcctcaagattgggtaggtaagaagttaagcatgcgaattgaaaccacgttacaaaagaatgctaacttagacaggtatttggataagaatacgaatcaatacaacattcctaatgttggtcaaatgatctataacgatgaaaagatcaagaccccacctgtttatgttcatacaccgaatgatgaagaacctactgcaattaagcaagtagaggataagaacagtcaatatggtgaaaaagccaagcatgacgctggtgatgaattccattatcgagttcaatattcaattcctgaaaatggtaaagacattagtaatgttgttttctatgacgatttggaaaaggttcttgatcttgaagacgttaagatcaccgatgacaagggaaatgaagttactaaagaaggggatttaaaacttgataaagataaagaaagttttacttggcaaccttctaaagaatatctaactcaaatgccaaagcatatctacactgcagatattactgtcaagctgaagaccgatgcagatttaagtggttacttgaataaagcaacaaagaattacgaaattcctaatgttgctcatatgaagtacaacaataaagatattccttcaaatcctgttaaggttgaaactccacctccagccgaaaataaggtagttaagagtgttcagggactatcaggttcctatcatgaagataaagacaatgttgaggttggcaaggactatacttataagattgactatactgcaggtgaagggcaacatttaaccgatgttgagtttaccgataagttagaagatgtccttgaccttgaaaaggtagttgttaagaatgccgatggtaaagatattaccactgaacaaggtacacttaagcttgatgaaaagaatgaaagctttaactggcaaccaaatgctgacttggttaagattatgcctggcaagaaatatacagttgaagttactgctaaagtcaaagacaatgcagatttacaaaagtatattaaaaacaataccatcgaaattccaaatacggctcactttaaggcgaatggtaaagacacaccatcaaatactccagttgtgaccccaaaggtagaggaacctaagacgcataaaggaattgttaagaatccttcagattgggcaaaattctttggcaacaagtctgaaacttcctcagggcaagactctgatggtgatggtgcattgccaaaggactatcaaaaggcgcaggaatacgttaaggttgaccctaatactggtgtatggagtaaggcaaacgataaggtaacagacaagcaatatgaagaagctgtaaaaattcttcaaacgccgtacaagaatcctgttaagtcttcatcacaaaacgctagtgaagttactactaaatctccaacttctaaggaagatttgaaagaaattattaattcttcaacagtagatagcaatcaagcttcacgtggtgatgctgtagattatctgttgacgtttgacattggtaattctcaaaatatgaagtcacttgtattaagtgatgatttggagaatgtgcttgacttaaagaatgtcgtcatcattgatagtgatggcaataatgtaactaatgaaggtaagttagttacttcagatgaagatgaaagctttacttggactgctaatgatccagctaaattctcacgtaagaaactatatgttgcaattgcttctaacattaaaccgaatgcagatgtatcaagctatgataacagtggtattcctaacactggtcatatgcaaattaacggacaagatactccaactaatgttgttcatactactctaaatggtgatccaaagaaccctgaagatcctaagaaggataagcctaacgatccttctaaaccagatggtaagaccccagacccatatggaaacttggtaaataagcaagttaaggctgaatcaggtcaatggggtgaatcagataaggttcaagaaggcaaagactttgactacaaggttaaatacactgtcggtgataaacaagatgttaaatctgttgaatttgcggacgacttagaagatgtccttgatcttgaaaaggtaaccattactgatgctgatgggaatgatataactagccaaggtgaacttacgcttgacaagaatactgagaagttctcctggaagcctaaggctgatttagtaggcaaaatgggtggtaagaagtatacagctaatattacagctaagttaaagaaggattctaaagtcaatggtgaagtgccaaacactgcagatatgacagtaaatggtaaggatgtcaagtctaataccgttaatgttattccaccacaggcagataagaagtcaccaagtaatgtaaataatcctaagaatcctacaaatagttcagaaaatcctaacaaccctaataatccaggaacaaacaatccaggatcaaataaccctattacaggtaaaaatggattcttacctagaactggtcactttatgatgcaacatgcgggatggtttattgctgcattagtggctattgcaggtggaattggtagttatctttacaagacaaacgatgatttcaaagaaaagatcactggaatcaagaataaattgattaagaagtaaaggagagatccaagtgttagacgctacaaaattaaagaatactaaggtaatcagtttagcgggagcagcactggcaatcatttcattaggatttgctacaagtacgaccgttaaggctgataatgcacaaatgcaagatttacctaaaggagttaaagctgaaggtgctaaaattccaggacagtatggttttagacctaaggttatgaaagggattactaaggtaacgccttttggtggcagttcggctgactgggcaacctcatctacaaatacagaaggtgagcagcattcttgggacgcttttagattgaaaggtaatgagaatctaaaagggaaaatcggtatttattactctaatgtagggaatgatccagtgtctgggaaaacaatcgatatgaaagtaactttaaacgattggaagattaatgcctataaatgggatcattctactgatccaattaaaaaagtcgctttagaaaatccgtatgcagcctttggcgttgatgattttgaaattttcactcctggtgatggtgccttagcttatcgtattgacttcattgaccatgatacagggaagccagttaagttaaatactcaaatgactttccttgatattgatggtaaccaatgggtcggttttgatacttcaacttttagcaagattgataatgtttattatggtgatcaagaaggtaaaacttggttatcatatatggataaaatgggcaaaaaatatatttattctgatgccaatcttcaccatgaagccctacctgatgggtcaggtacagtaaggtcaaaagatttgtatggtggaattacgacttctgtctcaaatgctgatcatatgaacgtcacctgggtatacggtactaatacaggtaagcatgctattgaatcacaaaatgaattactagcaaccaatggttactggcaattaaatgattctaactatcaagcagatgcagataaaaataaaattggtacaattgcttcatcagtttggaatggtaattttaatcatgcgtacttaaaatttggtggcagagctattcttccagataaaccattagatcctaagaagtttgtgtcagataaagatgaaggtactaatgttcctagtgaaattggtggtattaaatctgtaactcacgatatgctagaaaatcgttatgaacaatatcactatcaaattgttcattctgtaccagatgtacgtgatagatttaaatatagtgaatatagaattactgataatttagataatattttgaacattgatactggttcaatccgtgtttataatcgtgaaaatcaagatgttacccacatgttcactgtaactctatccagtggcaataatctatcagtaattgctaatggtgatacattggctcttaatgatttctaccgtgaaacttataagatcagctttgatgctacagttaaaccaggtaagagtctaaaggatcacgctgatcctaagcataaaaatcaagccgtaattgataaccagtcaaaggtaattactgataatggttcagctgattctaacattgttacaacaaatattccgtttactaaagaaaaggatgaaaaatttgtttctaatgatggacttggtaatactaagtcacttgtagatgtagactttggtaagaagtatacataccgtgttgaagcaacagttccagataacgttgacattgatagtttggctattaaagatactattgaaccagacgttcaaaatatcaagggcgttaaagtttatgattacgatgataaggatgcagcaggtaatgctaaggaaatcaccgatcaaggtaagctagaaattgataacaagactggtaagatttcttggactgcaaatgatccagcaaactggcacggtaagcatttgaagatgtttattgatactactttgattaatactcctaagcttcttgactacttgaataaggataccagcatgattgaaattccaaatgaagctcatttcttattcaataaggaagatattccaagtaatattactcacgtaacgccaaagacaccaaaggcttctgcagataagaagatcgaggtttcaggcgactataccagtgaagatgttgacccaacaggagatggggacaagaataaaaacactgataaagacaacaagcgtgaaactgaaacattaccaggtaacaaagacgaataacgtataaaggattagatgaaatggtgagaaagtctaatccttctttttctttcgggtgagatggtgggcaatagttaaggaggaaaaatggttcttagcaaacaagacaagtccattttacgcaagctacataattcccaaggcttaacacaaaaggcttgggaagaaaaaattatggttgagtttgtgcaagatttgatctcaggcactaaaagcgcatataaagatgcagttttagaagtcgcaggtaaaaaagaattatccgagcagctggagaaactacagattgctgaacctgataagactttaaatgataaggttacgtcatcaaaagatgataataagcctacaagtgattttaatgggacaagtaaaagtatttagtttagctaactaaatgctttttttatacaaggaggattaacaatgtttttagctgtttataccaaattgacctacttattttggagcggcttaatcggtactcaggcttttttaaacgaacatccagttttacttagtgtttggagcaatattaataaggctactggtagtaccgaaaagaacctgaagagtatcgccaaaggtctgttcattgttgttattatcttggctggtattcttttcgcttttggtaacagaatgtcgcaaaatgcaaagcaattattgatgtatgcactggtaggtgttgccattgttgctttagctgcaagtttagtaccatcattcgcaaatatgtttggttggaatgctagatagttagttttgtaagtaaggtgaagtaagtttaacttactgggttgatggtgggcgttaaagaaggagagaagattatgctattagttacctttgataaggtaccaaaaggggcgaaaaaatattttcaatttaagcataaattaagtagaaaatcgcctgagttagacattaaaactgcagatgatgcagttaaggactatgcaaagaccttagaagaagctgattctaatgttacatttactatctttgatgatgaagatgaagatcgtgaagagagcagctttgaagcacaaattttacctgaggatcaagacgggggtattttaaacttgattgatcgtgatttagagaatgaaaatttaactcgtgatcaagaagaaacagtaacaacgctaaaggatcaaatctttaatgaacttgaacctagtttgaatgatgatgaagatgacttaaatgaagacaatgggttcatgtttaatagtaatcaaattctagattcagatgatgaagtgcgtgatgaaatacctcctgaaaatgatgtaaatgatgagactgaggataacagtccaacagaagaatcaaatagtaatgccgcagccaatcctagtttgaataatgttcctacacaattacctgaaaaggttggtgcttcaccaattcaagcaggtcaaacaactgaaacaaaaactagtcgcagtgaagtaattagctatggcaaatataccgatgccaatgatattcttgaccgtttgccaagaggatatgataaaaatcaatttgctctaaataatattcgtcatgatttaggctatttggataatcctaaagatcaatatgatcaagcgttgaatgataaaatcgatcaggcgttaagagattattcaatgcaagatattcaacgtgtatatgatgaaggtttagcgaaatcaaaggctgcaattgtagatagattaaaggaagcatataacagagttactaaagagtcactagataaaattgttgaaggcagaacagcggcacagattcaacaactggcagttaaagcaactcatcaaaagcaaaataatcaatctgacttgagtaaattaaaagaaaataaggcattagaactaaaaactaatgatgaagcagcattagctgagtataagaaacaattagaagagaaacgaaatttagctctaaaaaattttaatgatcaagaagaacttaaaactcgtaatgctaatgaacaaattgatgagcaattaaaggctgataaagctaaagtagaacgtgttgcgcgtgatgaagaagtacaaaaacgaaattctgagttagatgatagtagaacaaccattagtaatgattttgatcatgcagttagaaataactatgacaagaataatgatttatttgaagacaatttaaagaaggttcaagaaaaagttcgattagctaaagaacaaataaatcaacaaaagctacttgatcaagaaaaggctgaagaaaagcgtcagcgagaagcagaagctgctcgcaaagaacgtgaacttgatttaaagcaaaaagcaattgagcagaatgagtctttggcaaaattgcaacaagaaaatatggcaaagttgcctgaggaatttgcgaaagcaattgctgcagcaattactcaaaataatttagaaaatcctaacgtaaaaattactttaaataatgatggaaagaatgctttagtgcctgtgccacatgttgatggtgaaatagtagacttagatgatactaagaaaaatgatgcaccaattgattctgaatcaaatgaagaagattcagagttaaagccagaaaccgaggataacagtcctaagaaacatcactataaatctgaaattatctcattagtttgccttgcagctgcggctttgggtggtacatgggcttatactaataaccattctaataatgaacaaaaagcttcaattgaacgatcaagttcaaactcgcatgtcaagaaaaacaagcaatcaagtagtaagcaatctgctaaaaaagatattgctaaaaatcaaaaaactaatgctaaatcaaagactaaatctactccaacttatttaactaggtcacaagctattttaaaacaatatcgtgaaactaagacttgggcacaaaagagagatatgctagatggtttattagggcaaggtgacgcaagaaatttaaagaagattgctacaatatattcaaatccaattgctagtttgtacagtgccattgctaatgaagacaaagctcagacaagggatatttggctaagtttaactgatgatcagcgaacagaaatttccaactcagctaaaaaagctgtcgcattggctttctatgatattgctgattggcaagatgggtggttagctagatatgcgtactaaaaaaagaagatcacgaataaatctaaaaaatgctagaaacaaggaaaagaatcttgtaaaaaagggcttgtatcaagttgaaagacaattacatcgtcccaaaaatgaaaacaagcagtctagcaatattaattttaattatacgaagctgataacaacgttggttataggaatttttatctttctagtaataatgtggttattaggagcattccataatgtcatgttacaaactaaaagtaaaaactataacttattcacgaatggtctcgatttagataaagcgggattagctggcttgaatttctttaagacacagttgaagcccatggaaattttagaggtatttgctgctagcgtaattattggtggattgttaagtcaaaaatttcactttgaaagtcaaaaagtcgctcatgggcaaaagggaaatgcccgttttactacagttaaggaattagaagacacctatgtaaaagtgcctgatcatagtcaaccagggttagatcctaaaaagcctagctttaaaggttttggtgggtttcccattgctcacattaatagattaggattaacccaaaaatttccatttattactaaacatggctattatttcattgatacaagtacagttcataatttgattgttggtacttcacggtctggtaaaggtgaaactactatattagaacaaatcgacctagtaagtagggctgaaaaacaatcgtcactagtcgtgaatgatcctaaaggagaactgtatgttgcttctgtaaatacgttgaggaagcgtggctatgatgtttatgaattaaatttagatgacccaaacaaaggaatcgcatttaatccgctacagttaatcattagaagctgggagcagggcgatgttgaaggagcaatgcaattagttaactcaattacctactcgctttattttgataaacaagcaggtcaaaacaagtgggttaatgacggcgcacaatcagctgttaatggtatgattattgctttgattgagtattgcatgaatcctaaaaactttagagataaaaaagcccatccagaatatattacttttgtaaatatcgctgatttagttaatcagttaggacagatagattatactaatccatcagatccatatactcaacacaacgttttaagtgaatactttaagcatttggaacagggatctattgctaaaaaagaattcggttccacaaatttctcagatgataaggcaagaggttcaattttttcaactgttgtacagaaactagatattttcactttaccgaaaaactcacgcatgaccagtatgaacacactagaaatgaaatcaattggttttccaaaatatttggagtttcaattgcttgatcaacgactatatggtgagttaattaaaatcaattttagagataatcataataaaaaactgaaaacgaatgagattcgtgttagtcaaaaaggatttgttgaaaacaactttgatgtcaatctaaaaacaggaagctttgttgaaattgaagctattgcaggacataagcgtttgaagaatacttttaagttaaagattaatcctaaagttaaaaaggttgaagtaagtcaggtaggaaaacctgaaattaagatggaaaactttaagatgcattatagtgataagccaattgcagtctttatgaaaattccagattcagatgcttcaaacaacttgctagctacaatttttgttaatcaattatatacagaattatcacgtcagtgtcggctggttcaaggtggaaagacaattagacgagtacaatgtatttttgatgagtttggtagtatgattccgctgcagaatatggatcagattatgacagtttcagcaggtcgtaatattctatttactttagttatccagtcttatgcccagctctacagtaagtatggcaaagaagacggacaagttattaaagaaaattgtcagaataaatgtttgattatgtctactgattcagctactaacaaagaattttcagaagcttgtggcaataaaacgattgagacaagcaatatttctaaagatcaaaatggtttagccaaaaatgttagtgttagcgtagataaagtaccgttgatactaccagaacgattagaacatttagctggcggtgaaagattagttttgagacctttaacaagaatgaataaatggggctgggcggtagtttcacatcctatttttaacacaggaaaaacattaatgccgtttgcacatatattcttaactgatgactttaatcctaaaactaatccagatttagttgaaaagattgatgcacacgccaatattaatttaaaagcattagaaatcgattggagcaaatggttaacttggactgaacaagttaccaaacaagatgaagatggaaatgcagtagtagaagaagaaaatttggctttgcaggcgtataaccaatatcgtcaaagtgacgcaaatgttcaagcaactactaaagatgctaaagaagaacaagaaatgaagaagtctttaaaggaagaagaaaatcagattccaccatttatcacgaactggttaacggaacatgatggtgatattagtgatggaacaaaacaagcaatattgaacgaggctataaaattaaaagatgtgcctgaaggacaaaaaccaagttcaatagcttttgttaatatcatctataaagataaaaaattagaagataagaacaaggaaaagaatgagttaacacaggaatttagccaaagctttaatgaatattatcaagataagtagcgataatgactacttatctttttgtttaaagaaaggaaaaattaatgacaaattggttattctatttaactagtttcatcaatcctaaatatcttgatatttttagtagtttggtagattggtggcaaaaatcaaccaattcaggtgattatgatccagccaaattacaaaaagtaactgaagctctacaaaatgcggcaccttatttacattatgatgattttttgggacgtattttgaatcagacaaaatggggcatagttaagatcttttatggatttgccaattgggcaagtgaactagcaacagatagtttggatttctcaggaatcttaaaatccacaggattaaatactaatttaattaatggggtaatgggaattgctgcagggttgatgattttaaccttaacttgggtcggaattaaaattggtacctcaagtaaagctcctcaattaaaaaatgtcgtttggcaattagcaatttcagcgttcttaatcggaaatattcagccaattacaaattgggtggttgatcagtctacaggtgtatataaaggctttgtacaggctgataatgataaagggacgtcaagcttgccgtatcaggtagtacaagccaattctaatgacctattagcaatcatagctaataattttagtggcttcaaaatcaataatggggatactaataccaaatgggaaggtgtttctaaagataaaaatggtgaaattaaagaccagagacaaaaagatgttcactatggttcatttgctatgaacaagtctgattttgatactgcaacatcaggcgatttatcaactactatttcagctgatttagctgagaaattaagtaataaagcaaataagtctaaggaaaaaccagcatgggatcctgacaatttgcgttataaattagctcctacaggcgttggtacgaaatcaaatgtaaagggaaaagcatattcaggatattatgcaaccaaagtaagtcaaagcaatactgcctttttcaaaatttttaacggtggatatgaacgatattcagtacaatttttcccagttgtagttgccttactttcaatgacagttgccttcttactagtttgctttgtttcagtaagagcattcgtggaattggcaattatgcaagtattatcaatcattattttctccactgatttggaaactggaaagcgtactaaagctgcggtacaagatatttttagttcagcgttgttaattgcattccaaggctttgaattagcgttctatagaattgtagccgtgtggatgagttcatcagatgcaggaaagattcatgataatccttatttatatgcagttggaatgattgctttaacttgggcactttgggaaggttcaagcaaggtgcaaaaattctttggtttggatactggacttaagcaaggttggagtaaagttgctggaggaattgcagcaactgaatatattgctggtaaaggtaaaaatttagctgaaggcgctgttggagttgccagaggttctggtaagttagcaggggcagcgattggtgaagctcaagcttggcaagctggtagctctactaaggctattgctaaggaaaatggagcaagcaatagtgaagcaaaacaagctggcagttatgcaagaagagcctttcgttcagctcataacgactttaagcagaatggtggcagtgcagttgattggaacagggcagtaaattctggcgctgtatctgaaactgtacaagatgaagccgctagaatgatgagaaatggtggtttaactgataatcagtacaacactttacatcataatccatacatgcaaaacagagctgaaaagaatggtggcagtgcagaaccaacaggtattggacgtgatacttcatttgtaggaaatccaaactatgatggcaagaaagaaacagttgcaacaagcaatgttgattcagctaaaaatgtaaatgaccaaggtaagaatacatcagttaaacctgataatattcaaaaccaaggcattaagaccgatgatagcaagcctaaatcaaatgctgctaaggaaagttcaactgacggctctattaagtcaacaggtggagctaagacaattggtaatgatgcaaaaattccaaataccacagttagtgaagcaactaatggttcaaagactggtaaaaaagaaacagcaaatgatcctagaactaacagtgcttctgttactggttcaggttcaaagcgtggtgaagcaaatagctcttcaagctcaccaacaagtagtaatgcggtcgatgaattaccaagcttgagagatactcaaaaatccactagtgagttggcaagtcaacaacgttcaaatcaacaaaccacaccgccaaaaccagttggtgaaggcggtagacacttaagcaatgtttcagactttaagggacaagacagtcatagtaaagtaactgaaactgctggtaccaaccatgtagatattgaaagaaaggctggcagaactgaagtatctactcatgatgtaggcaatcaaggaatgagtagtgtgaaggatgctatgaagagcagcgtaccttcaaacactaatagaaccgttgaaactcaaggcaatactaacacggtgactgaaattaagcatgataagaccacaatcaatcagcaagttgaaaactctactgaaactaaatcaccaagttctaccaacattggcaaattaggtcatggagatagcagaagaaaggattagtgcatggataaatatcaaaaaataatgattcctaagtcaactaatgtatctatccaaatctttttcctagatatgtttgatgtttttgctcttttcattgggggtatggcaggacaacaaatttcttttctatttaatttacaaccgacttggcaattagtaatgacaggttttggagttgtagtaggaattctgctagtaatgcgaacccctctagcgccaaagattagaaattatcgtgttttgttaagcattatgcgacaagaccaaagcagatattatccattatttttagaaggagaaaataatgcgaacaaaaagaaaaagtagaaacagtaggagcaaagctcctagcttgtttagagcttttggcttagataaaggatcaagacaagatgcaagagatcaatcaatagttgaatacttgggctatagtaactgctcaaaagacgggatacttgatttagtagatggcacccaagcacgctatttgcgtgtacattcgacagatttatattcacttgatgatgaaaccagaagtaaatacctagattcatttactacatttaatcggatttatagcaacgattataaaattgtagtcatgtcgacgagaattgatactagtgaacaacaacagtattttcgccatttaaagaatgggattcgttcacccaaaaccagatatgaaaaaatgcgtttacgattagttaatgaaatgttgttgcaatcagtaatgctgtcaagaaatacagaagattactctgatgtgcagttttacattatgatttttggagaagatttgcacgatattagagttaacactagaaccgctcaatttgctgatcaagggttaatgggcttgagaccattggactatgaagaaacggttaaagtactctttagagaaaacaacttgaatagtaagtaagggagaaaaaatgagaatttctagtttattgaaaacaaagagacacaagaagaaaaaggtaactgtaaagctaaatccaagacaagttaccagcttgaaaaagcaaagagaattactaaaaaatggttacaatactaagtttctagcagaagtacaaccgcagggcggtattacttttgcggataattatgcaattgcaagtgatggatatgctgcttgcttatctgtaatccattatcctaatgatccgcttttgctctggcttactcaagtgtcattaaatgattcaacattaactacaattgacgttaaaactgattcgggctatgaaattaagcggcaattgaatagatcaattgaagaattagctgaccggcaagttaatgctagaaaagccactgatgctttaaatgcacaaaaagatatgcaatcactagaaaaatatgcattggaattaagtcaaggtggcgaaattcctaaattaatgctaaccagaatctttgtatatgctccaacgattgaagcattagatcaatcagtttctaatcttcgtggcaagcttcgaggcgagggttataacgttgctgtttatatgtttatgcaagataaacagtttaaatcaatggcattaccaatcacagagcaagaaaaggatttagcagcattgccagaacaaccaattccagccttaacggttggagctggtgacccattttcagctcaaagcttaaaggaccctagaggagtctggttaggtcgtacttcaactgggggagccttttattttgatcaatttagatcaactaatatcagaagatcgtttaatatgatgatcttgggtaagatgggtgctggtaaatcaactttaatgaagatgttggttgaaggtacaattgctagaaatatgtactttcgtggaattgataagactaaggaatatattcctttaattaagcattatggtggaaccgtggttagcttggatggatcagaaggtatgattaatccacttgaagtaatggcaactactgtagatgaaaatacaggtaaggttgatgagctagcaagtttttaccaacatatttctaaggtagatattctattccaaatgattaataagggatcctttgtaaatattgaaatgcaagaatttgattcattgttacgtggattttatgtagacatgggattattacctagaaattttcaacaaaataaaggaaatataaaaattactaatttagatagtgaaaaatacccgacttttagtcagtttttaaattggctaaaaaaattggctacgccaatgtactatcaacaacatcaatttactgctgaaagaataagaacttatgaaaaaatcaaggtagcattggaatcaatgattgagaattacggtcaattatttgatggttattctacaatgagagatttgacagatactaagcttctactatttgattcttctgctatttcaacaatgaatcaaaatgtttatcaggcacaattgtatatggctctaagtttaatttggagtcatgcattgataaatggtagaaaacagaatgctctgttaaaggcagggaaaatcacacgtcaagatgtacagtattttgatgtgttcctggatgaatgtcataacatcataaattatgaaaatatttttgcggttgattatgttaaaaacttcgaacgagaaatgagaaagtttaatgcaggtattatatttgcgacacaatcacccgaagaaatggttcctgattcagtagaatctgctcaactatcaagtttaaaagtggtttttgaactttgccaatacaaatggctaatgagtatggatccatctcaacttaagaaaatcaaaagtctattaggcgaagcattaaatagttcagattacagtaacattcctgacttgcaaacaggacaagcaattgtcacgatgggaggaagagaaagatatcaagtcaagatgaaaccatctgaacgacaacttgaaatttttgcaggtggtcaataatgataacaggtattaagcggttaagacagacaaaaagatgggctggattagccgcttttttattaggaattttagctgttttatcagttatatattttattgtaattttaattgcagcaatgggtgcatcttcagacgatgagtgtgatacaggtggagaacaaggaggagtagttaaagggcgaatcagcgtcattgaatcacctaagtatggacagactgctatgatgcatatagcggatgctgtacatgagaaaactgggattagtgctagattactttttgctcaaatgggacaagaaacaggaaatggtgatagttttgttgctaaacatgatcataattttggtggtatgacttattcagaaggaagcactatcggtaccaaaggtgaaagccgtggtagtgaaggtggtaattacgttcactacaagaacttaagtgattttgcgaccgagtgggctgtgacggttcagaatggttttaaaaaagctggattaggaaaagatgctacagttgctcaatatgctcatgcaatgaaaaaagcaggatactataccgcagctgaaagtgattaccgagcaggtatggaagctcaagctaaaaaatatgatgccttgaaaggcaataaatcactagctaaaggtgatgggtctagtggctcagataattcagctgaggaagattgtaagccaataagcggcaaatgggggtggccattcaagtcaattcctaaaaaaggaccaggtaatacaatctcaggtgagcaattatttggtaagtcatctacaagaacaggtggctttcatgatggtgttgactttggtactgttccatatggtggacaagatattttggcaattcatggtggaaccgttaagaaaattgcatttcaaggacatactcaagatagtctaggaatgtacgtttgggtagaaggctccgacggttggaatgtcatttatcaggaattcggctttgatgaagcagatttgaaatacgtcaaggtagaggtaggcgacaaagtttcagtaggagataaaataggtcacttagcaagtaatgcacatggtattactcacgttcacattggtgcaactaaaaaagattttgctaccgcagagctctctgcgtacaaagatgatggtacttggaaagacccaattaaattaattaaagatggtttgaacaatgatgcagaatctgaagaagatgatggcttatcaaaaactgaatctgaagcacgtgactggattgttcagagagaatctggaggtagatgggacgcagttaacccagctaacccaagtgtttatggacgttatcaattaaagagagaatatcttaatggtgattacagtcataagaatcaaacaagggtagcaaataaatatgtaaaaggcagatatggttcatggcgtaatgcacaaaaattctggatgaaacatacctggtattaatgccaagaaagaaggataaagatgaagcagcagaaaaaggagcgagagtccaatctgaaagtatggatgatgacagctggagtattattcgctgttctgggaatgtttgcaattgccagagttcctaaaaatgatgaactgaatgatattagggcagaaattaaaactgttgagaagcaaatagttcaagagcaaaatagtcaaacaaagaattctgcatataaacaaaagtttgatgtggtgagtgcagaagaagaggcacgtgacaagtttctaaaagtgataccagctatctatactaaaagaaaattttcgtcagctaaacaaaaagaagaatttagtgcttggacaaaaatttttccaggtaaagagggcaaaaacttcatcaaaaataatggagattcttatggttatttaagaaacaagagtacaacggtttactttggtgacttaacagatgtaagtcatactaagattacagtagtaaccctagtcgaaagtgccaataaaaaagaagttacttatggttgggactttgattataatcttaagacccaaagaataaatagctttaaagaaatcaacatagagaggaactaagatgaataaaaaatatcttttaggtggagcaatcctcggaatcatgctcgaattaggcgtaatcaattatgagactaacaagcaaaaagctatcgactatcatgttgatcaggcaagaactgagttggctaaaaagcaagatgagttaaaaaatgtagatgctaaaattggaaattcgcaaaagcatattgctatgaaggaaggaggcagcaaagagaaactagctgagcaggatgtagcacagacaaaagccaagaaacaggtaagtaaactgctaaaactgctttacacgtatgatagtggtgatgaaaaattaaaaataccagacaaggtgaaagatacacatttagtaagtgaaaaagtcttaaagaccaattctatgtttaaaaatgataagcaattagagctccaatatagtggggcagatatgacaggtcagattgatgaactagatttgaagacaggtattttagaaaataaccaagtgcctgtatatgccaaagtttattttgaaatgacaaaagatgatagaactttgggaacaccaactgatgcttaccagctgatttatgatacagcgactaatcaaattacttcaattaagtattttggtcgctatcaaattgatcgtgaggcagattaagatgcaaccgaaaaaagaaactaaggtaaaaatcattgcagttagttgtgcaatgatttttttgttgttcataggagttattggttttaatcaacatgttaatcatgaactaaatcaaaaaaacatcgttaaaatcaaaactaatgatgactcaacagttttattttatcgagatgactgcaaaagctgtcgttctattttttcatacgctgtaatgaaaaaagatttatttagaaagaatatacagtttgtaaatactaatcaaccacaaaaccgacactatattacggagtataagttaactaaggtaccaacttttatccatttaaagtatggaaaacaagtagaaaaatatacgggaactaacatagaaaagatagatcaggtcataagaggtgattaaaaatgtctagtcgaattgtatatcaatcagaaaaaactaaactaaaaaaatcaaatcatcgtttgaaattagttgccttagttttgtttttgttatcagcagcacaactaatggcaacagtttactttaatcgtgataatccagattcagaaagtcaaagacaaattcgagatcaacaggagcagattactgaattaaaacaggaattaaatgatagcaaaaactatcgtgtacattcggatgacaattagaaaggcaaaaaatgattcaaagcaaaaacaaaaatgaattgaagcgacaccaaaaacataagtatcgcaaaatttatttatcattcattggagtggtggctgcaatttttattgcaatcgttgctagtccctattggacaggaaaatcaattgacactgagcaaactgttaatgtagtgacaggcaattcatcattttacctagcaaattctatttacaataagcaaagcgaaaagatgttgctagagtattatcttggggactctacagacgtaacatctactagtgacgattcagacttaagcaacttaaagtatgctacaagagtagtaaacatgtcacgtggcggagaagatggagaagagcttgcgatcaaatcacagaaaatcaataatcactttttagtaattgaggttagcggaatcaaaaatggctttggagatttaaagattgatattctgccacaaaaagttaataagcgagttaacatgcaagatttctctgaaaataattatattgagttcttcattaaagagaataaggttgatctgacttcaagcaaagtaactaagagctatcaaaactatatccttgattatcgtcaatatctgattaattggaataaaaagaagattagtcaagaacaaaatacaattaaggatgctcaagctacgattcaaaattctcaaaataatttagattctgcaaaggcaaagttagaaaaagttggtgatagtcaaaaagaaaactatcaaacacaaattactagtttggaaaatgacattgcagaaaataaatcagatattaaacaaagtcagcaagcaatttccaagtacgaagacacaatcagggatattaaggacggtgattttgataattagatgcaaaatttggctaaaaaattgttacgtcttggacgtaataagctatgcaaggagacgtcctgttcgtatattactaaaaaacattacgtatcaagacgtaatggtaggtaaaaggcgaacaatttagaagtatacagacgtcaaattaatcagaagtgatatcacttctaaaaatgcgaaatcgcttggtacaaccaagcccagcacaccttgacaaaaggcgtggggtcagatttcccttatgctctttactagagataactaaaagaagcagattttagtcaaatttcagagtagaaactagaaggaaaactagaaactagaaatcagaggaaagaaaaattatggtaaaagttttaatccgtggaatcagcgaacaaaacttggctagaattgatcggattgttaatcaattaaatcaaaattcaagtaagaaaatttccagaaatcaatttttgagagaacaaattgaacaaattccaattaattttcaaaatcaaaatgaagattcgcaaactagtttattgattcagaagcagaataaacttctgcaggaaaatttattagggctgaatgttcttgcaaagtatttcattagtggagatgttaatgacaccgaacgagcattaaatttgttagatagtttgtcagaagacacggcaaaagaagatgattaaatttagaaagagggcaagaaatgggacgacagcactttttgcaatttcgactcaacgataagcaatggaaagaaattaggcagattagaaaagaacattgctttgataataatggtcaactttataagttcttattcttcaatgccatgttaggtgttcaaaaagaaaaagaactggaagagttacaaaaaattaatcaaaagattgataatgctttgaaaaaaagacaagaaacttacgctgattaagaggactagaaaaaatgattaagacaacttttagagcgacaatttctgatacagatttagattggattcaagattataaagaggaacacgatttaaaaaataatgctgaagtaattcatcatcttatgaagttagcagaagaaaatgaaaaaaattctaagtggacaaaagatttaagtgatattagaaaacaacagcgatttaccaaagaacaagttgcaattctaacagaaatggtaagtgagtttttgatgactcaaggaatgcaaattgtcggaaatggaattgatgcagaagtttataaatctgcaaagagaaaagtaaaagaaagaattaataatagaatggaggaaaatggcggacaacttgagtaagttttgatgctgagattgcgattctacggcttttaaaattgaaagagcaaaataattaatcaacttgcttcatagaatttttatttgtaggaggtaatttttgggacgaccagctataattttaacttcaaaattttctgtgccgagttcacgaaaagcttttggacgttacgttggatatatagccagaaaagaagcattagaagaaaaagaatttttaactgcagaagaaaaagatgaattaagtcgagttaaaaaacaagtaagaaaattaaatcaggaaaacaactttactagagtaaaaagtgaagaacattctgaacgagaagcagctgctgaaaagttaatggaaaagagaaatttttttgatttgaatgataaggaatttgataagtatcttgggtatatggtacgaattgatgcattaaatcagaaaaagaacgaaacgggactaaataccaaagaacaaactgaattggaaagaatagggcaagctgcaagtaagctgagtgaaattcatccaaccaaagaaaaagttttagatggagtatttagctctgacaaagatattgttcagttgaaagatttagattatattcgtgagcaattaaatgaaggacaagagaataattctgtcttgtggcaagatgttgttagttttgataatagttttttaaaaaagaaggggattttatctagtacaactggaatattaaatgaggaagaactacaaaaggcaactaaaaaaatgcagagtatttttcaaaaggaaatggatccaccattaaatgagatgtactgggtggcttccattcatagaaatactgataatgttcatattcacattgcaacagttgagaaagacccaagaagaaaaattataaaccgtgaagggattagtcaacctaagggtaggcgaccacaaaaaataattgatcatatgaaaagtggttttgcaaatgaactgattggttcttcagagatgactaaagaattatctcagagacgtcaagctattagagaagcaattcaggttaatttgactagtcaagttgaacagccaacttttcaagcagagataaatcaatttgttagagcattgcctgagtcaagaagagaatggttttacaacaagttagataaaaatcaaaaaaagatgtcggatcatttggttgatgaattgctaaaatataactccgattttcaaaaatataaagacttagtttggaaaatgcaagatgaccgacaagacttatatggtaaaagtaaacgtgaaaataagaattatgcaattaaccaactatatggcaaagaaggaatttatgcaagaaatggtaacgcattgctagctgatttaagaaaaattgataagcaagctaaccataatcaaagacataggattaattttaaagataaagttgatccaaacgaatatattcaatccgcattgaaagaaattcgtaaggatacaacaatacaaaataataagataaaatcaaatgacgactatacacttcattcacatattattaagcgtagaaaaaatctaaaaggacatatttacttaaaaaagccttttatcagtcaaagtcaaatacgaaaaattaaatctaaccaagaaaaagtatttgaaaagacaaatgcagatattgaaaccaagaagaacttacgtgaatttgagaaattgcaaaatgaagttgaacgagaattagaatagaatcatcttaatttgtgactatatagttagtcgggtataggtggggaaattagcaagtagttttactacttgcttttttgacgttaaagaataggagaaaaaataaatgcttacttttacaaaggaacaaattaaggcagctaattcagcgagtattgttgaatatgcaaggagtgcaggaattgatttacgtcaaacaggcagcgatgaatttaaaggggtagaacatgattcattggtaattacaccatccaaaaattctttttactggaattcaagacaagttcatggaaaaggtgcattaagcttttctacattgtatgaattgtcaggtagcaatttaaatgaaaaagagaaattcctaaaggcaatggataaggtgttaactagtggagtaggtgatggcaaagtttatcaaattaaaaaagaacctttcaagtttgataaaaatcaaatagattcagaaaataaaattaatcgagtatggggatacttgcacaatcaacgtggaatttcgagtcaaactatagatcaattacatagagacaaagtgcttgcacaagataaattgggtaacgcactttttttgtggcttgatcctcaagatagacgacaagttaaaggagtatcaaaacaaggtacaaaaattaatcatcaaaaatatggtagaagaggaaccctcaaaatgattgaaaaaaattctaccaagggatatggtttttcattcgattcaccaggtatgaatggaaaaactccagaaaatattagattttttgaatcaccaattgatgcaattagtttctttgacttgtctaaggtaaaagtaaagggtggaatgaaaaatactaggtttgtttcaatggatggccttaaaaaagaagtgtttgactcgtatataacacaaacagcagcacaattacaaaaagaaggtcgaattcttaaaagtgtaggtttaggtgtagataatgatgaagctggaaaaagatttgttaaagatattcaatctaaatttcctaaagttaaatactgtaaacctagtgaaaaattaggtaaagattggaatgacaccttaaaagcttttcggaaaatgcaacaaggaaaacaaaaatctaagcatacaaccagaacattaccaggacaagaatttgaaaagcgatcggcttatttgagaagagaccaaggattagaaagataagcatatagaaaaagcagttagtcagtgactagctgctaatttaatgcaaaaaaagaagcacataccgctttccgtatgtgccgctctttaatgagtctcactgatctattcctcgccttctttaagctagcatatcgctaaggtagtaggcagccaagttgtaaatacaactctttaatttgcactgtgatctttacctacattgtaacatgaaaggataaattaatgaataatagacattctgactagcatatcgtcaaggcagtgggcaacatgatcaagtaatgatccttaatttctactgctattcttaaactttttttaacacatattcaataagaaaaagtgtaaaagaaaagtccctccaaacatcgaaggactttttgaaaagcaatgcactacgctctcttttgccatacgacaaggcagcgagccacctgaattgaaaattcaaaaccttaatttgaaaattgcttcttcaattaaatttattgtagtgtaaaggagaaaaaaagtgaagagattagaacaaactttgaataagcaggttaaatatatacctcatggatatcatattatgcgaagaagagatcaaagattagaaagataaataataagaaagagcagctaatcaaaaactaactgctaatttaatgtaaaaaagaagcacataccgcttgcgtatgtgccgctcaaaaaacaaggattattaattaaatagtgctaaaattgtaagtaatctaactaaacggaaagtaagtgagaacaaatgagtgaaaacctagaccttgcaaacttcatagtctcttttggtagtatgaatgactacagtagtactgtgttgcaaacaaaaagagccttagatcttaatgacctatctaagcttgtacatcaacaccacgatggtgccatcttaaaagatgctttagatggcatagctgcagcaaagaaattcggatttacaagacaaggaattattgaaattaataaagcctttacccatagcgaagaagaagacccaagtattccagggcgcttaagacatgcaagttataatccagacgacgcaattgtcattatcacagaccctaaaggcacagctaaaggtgcatactttgctccagaaaacgtctaccccgaagacttagatgaaataattgaacaatacaactcgtctaaacagactactaaagatgcgtggagagtatttgcaagcttatccaagcttcaaccattccaggacggaaataaaagaacagcgctaattgccgcaaactctgctcgagatacctgggaaaccagagattatttaacccttccttttgacaacatagaccacgctgaatttatgattagcctcatgagattttatcgtgcagatactagagaacaagaagacaaagctttggaccgaatgatagaaactttacctagcaagaacgaagttgcgtatcatttgagcaacgaaatttcgcaaaaagatattgacattaatgacctaaaaactaaaagaattaaatcattctaccaaaatcaagaattagataggtaacattaaagaatcgcaccaaggcttaaatagatggtataaaaaacgctgaaatcattgaattatcaaaacttcagcgttttttattctcagctaagacagtaaattatcttcagcagaaacgtgtaaatttaaaattactagaaagaaggtgatagtagtaaaaactaaataacttgtatgtagtcaggacacttcattatgaagcgtcttttttgttttcttagaaaggaaaaattatgtcaacacgatcaaatgtatcaattttaaatccaaatggttcagttactactcagtattttcatatggatggtggacttactttcacaggacaaaatttactagataattatcgtactttagacgatgccaaaaagttaattgaaacagggaactataacgataaccatattccagaaaatcctacagctgctactaaacttatggatgaatataattctaatggacaaagaatcgatgatcctgttagaaaacagtatcatgacttatctgcgatgattaacgatatatcaaagaatgacggtaagtaccttaattcagatgtagagtatcattatcttttttcaccaagcgctgaaggaaattatcaatggcacacgattaatcgaaatggtattaagcccctaactcaaaaagttattgatagtgaaaaagaaagtggaactttagccgatgtagattggaataaatctagttttacttctgattgggcagcaccattaactgataaagagatatcgagtcttaatgatgatatttcacttcagtcagaatatcttgatcgccttcaaaaatcaaaaccagaattagtatcaggtcaagttaaagataaaatggatatggataaaaatgctttaaagtctgaaagacgacctagaaagacttttgaccgtaaagcttggaaaaagaaacatactcaaaccgttgaggatttaaaaaatggactacttaaagaagtagataattatactcaatcaccagagaaagttgtagaaatgcttgattttatggataagtttcataactattcctcaagaaatgcaatgatgattcagatgcagcgcccaggtgcgactgcggtgggatcatttgcaaagtttaaaagcatgggctataaggtcaacagaggtgaaaaaggaattaaaatatttgttcctactaaagctacagttttctatcgtaaaaataaggatggcaacaaagaattagctaacttaaagactgccactaaagacgaaaaacaaaaaattgaggcgggtaatatagaaacttaccaaaaaactttttataagattggcactgtattcgatgctccacaaaccaatatgccaaaggaaaaatacccagaactttaccctaatagacaccaagattttaatatgaagaatccaggacagattgactccttagagaatggattaagaagtgtagctaatgacatgaaaatgccagtcattacttatgacccatttaatgcagatattcgggataaatataaggatacgcaaaatgctaagggatactttaacagggctactaacgaaattgtgttaaatggatacaacactccaacggagaatgtatcagtgcttgctcatgaattgggacatgcacagctacataatagccaaaaacaagaaaagggcctgcctagagaattaaaagagatgcaagcggagcttacaagttatctttattgttctcattatggaattgatgttaagcaagagacagttgattatatagctaattggacaagcaacggacaaaagtttaatgagttaccaagtggggtaaaagggcaaattttgacgcatgttggttcagctactaagacactaactaatagtaccgataagttactcgaaaaagaacaagaaaaattgggtcaaattgtcaaggaaaacttcttagatactcctgaacactcgcaatggtatgtgcaaaaagaaaaaatggagcaagaagttactgacaatgagactaatggaactaattttaagaccgaattgacggcactaagaaaaattgaaaaaagtatgacaatagatacagttagaaatttggatgatgcatttaataaaacgcagtgctggacagcagatggcaactatagcaagttaaccgacaatttacaaaatgaaattgaaaaaaatcaagaaaagtctaaattgcttgatgataaagaagtgcaaactagcaagccacatgttgctacagtaaacagttcgctgaccaatgaaaaagcaaaagaaattgctattcaaaaaggtgaacaggaattggatcgttaaaaaatatcaaaaatgcaaaatttgatatgaggattgcaaagcagttagtaatttattgaacaagtggtgagtaaataattttctaaatattactcttatataggctgattccattgatttagtagtataatatcagtataaatgatatgaggggtgcactactatggcttcaattactaaaaagagaattcaagtacaaattgatgatggtgtggtagaagaaggcaatgctgttctaaaaaaattaggtttaacacctactattgctatcacaatgttctataagcgtcttattgctgagaatgggttaccattttcaaccaatttaactgaaagagagaaagatgaattagaaattcaaaacttaacaaaagattgggcaacagaagacctggatagccctgagaaactgcaagaatggatgtcaaaagatgagtaaaaatattgctacagtatatgttcgcttcgttcagatttcaggtggtaaaagacgaccaatattcatattacaagaaaatgaggataagttctttttctttgacataacgacaaagtttaagaataaatccgaaaaaattaaaaagcattatttcgaaataaaagaatatgaaactacaggtttgaaaaaacattcgtggattgatacttatagacgttattcggtatctaaaaaagatactaatgttaattatataggtagattaagtgatcaagacacacatagattagttaagtttcttcgtaaaaccgctaaaaaataattttatgttaaaacagccagctttaaagttattgtatttagagctggctgttttttgcgtgtttataattagtatatatgttacttatgcttaatatataagcaacaatatataatctggtgccttatttttttagttagtgcaatatcgtatactataaattcaatatatgatataaatgagatgcttatattatggtaaggagaaataataggcagttatgaaagaagtcacaagattagaagatatattgttcaacgttgttagacctaataaagaaggggaattacgaggtttgtttaattcctattatgtgattgatttagttaaaccagctcaacttaacagaattgataatttagttgtgatcaaaaagaaattaattaattatggttttgacgtaaaaaaactaaagtatgatcaggcaagcgactttattacttatattaatcaagattggattaaaaattatggttatgtaattagtgataagatttatcaaaaagaaaaggaaagattagaaaataagggaatcgacttttattggtattctaagtacctcaattgtaacaatgatcaacaattgtacaactactttagaaagataattagtcaaatgaataaagttattttggaaagcattaagcaggtttactaagcttttaaatatcataaaaatgatatataatatagttgcctccattaattaatttttttgaataatgagtatgctatgtgaagaataccgtgaggtattcttttttgtagaaaggaatagtaacgtgacaagattacttattttaaatgaaaaaaagtctcaagcagaaaaatttgcggattatttaggtggaatgagtggcgaatttgaaggaaatccctatgatattgtttatgccgcaggacatttattacaactcaatgcgcctaatgaaatggttgacccaaaccttgcagctaaatatgcggattggcagaatttagataactttccttggaatcctctcgatttaaattggtcaaagcaagttattaagtccaagcaaagatacattgataatattaagagcaatttgcctggacatgatgtaattattattgcaagcgataatgacccgtctggtgaaggtgatgtattaggttgggaaatagtagattatttaaactggcaaaatgaagtctggcgaattcgttttaaaggtgatgactcagctaactatgtaattgattccttacataagcctgagaaggctacagttagtgaacaagatgctcaaggaattttagtaaaaggaaaatcacgacagagatttgattttctaacaggattagaagaatcaagaattgctactgagttggcaagagaacagggttatagtaataaaggtaaggcgctttcaataggacgcttgcagacgtatattacgtgcttagttgatgagcaaaacagagcaagaaaatcatacgttaaaaagcctttctatgaaataaggtataaggatgcaaacggcaatacatttaagcgtgactatcaagacggtgatacttggcgtttttcagacaaaaatctagtaggtcaagatttaactaattattctcaagatcaaattattattgatagcacaactgaaaaaagaacccagccgccaaagttagtcaacttggctgacttaggtaagattttccaaaaggaatatacaactgaacaaattactgatacttatcaaaaaatgtatgatgataagattgtttcttatccgagaacagaagacaacgcaattacgattgatgattttaacgagttactaccatatgcagataaaattgcagcagtcgttggaattgattcaaaactcttaagtcataaagacccacgcaaaaaattcataattaagagtgaggatcacggagccaatcgtccgaccaaattagtaccacaatcacttgaaaaagttgaagacaaatatggtaaatgtggtcgagatatttatgaacgagttgttaaatcatatctagcaatgttagctgaggactatgtatatactcaagttaaagcccatattgcaaatcatcctgattttacaagtacgattaatgttcctaaggaactaaactataagctgatttttaacgaaaatgatttaaatgaagaaaagcaatcagaaaataaggctacacattttgctcaaaacgctagccctgaagtatatcaaggtacaaatacgccaccaactaaacctactttaactttcattttgaataacttggataaatggaacttgggtactggtgcgactaaaatgcaaacaattagtaaattacaagcaattggtaaagaaaataaaaaagttattccccaattaaaagtagtaagaggtgtttttgaagtaacaggaactggcgcattgattgcttacttagctaaagatacctatttgtcttcaggaaaaattacaaaacgcttgcaagacattttgaatgaaattaaggctgatcccacaaagcaagatatggtctactcagttgcagaaaagacaattgaacatgataaagcagttatgatagaaaatgccccattattaaatcaagatgcacaagttaaagaattagctggtgatttaaaggcaattgaaagatttagcggagtctttactcaaacaaatgaaacagtaaacccaccagttacgatttttgatggacatacgactactgaagtggagcaacaagaagctttagaagggaaacaaatcacctattcgattgaaaaatttggtaaagaagaacaacatacggcttatttagccgaacaaacgtataaaagtaaaaaaacgggtaaagagattaccagagttggttggaaagtagagtttcctgaagatactgatcacgttaaaggaatctataagcctttagctaaagagattaaatttaaaaaagaatatggacaacatgcttttagtgaggaagaaattaccagcttgttggcaggtgaagaaatcagttttgaagcgactgataagcaaggaaaaagctttacggctactggaaaattgatagaacaagaattgaaagaaggtagacgtaaaatcaggttctggggctttagagttaatcctaaacctgtagatacaaatgtctatgtagtgattacatataaagacggtaaagaatatcattttaagaaaacatatcgaggtcatcgttggacccctgaagagattaagaaaattgcggcaggaaaaaagcaaattgtagctttcaatggtcgtaaaggtacctatcgaatggagattaagcctaatcccaataagaaatacaatggcagaaaatattttggttttgatgagaaatttgctaagtagaggtagtttatgaaaataaatatgattttgtcctttctaagacgaacagcactttttattgcaactatgtttgcattttttgtttctgctaacgcaggtgctttggcgcaatcaatttgcaaggtttctacgaagcatttaaattccaatattaattttacgacggtcggctttggtatttcagtaataatttatatttttctcttgtcgatagggtatctaaaatcagacataaaaaaatcaaaggaactaaaagatgaaaaaaaagattcttgataaatcaattggtattggtcaaatgatagtaactttccttatttatgcggtagttcaaggattatttatgattagagccaaacaattaagctgggttgccgttatatttatatttggattaacggttgcattactgagcttgacctacggaatttaccaaagaagacttaatcaggtgaatgattggcactttactagttacaataaaactagaatgccaagatttactttaaaaaattggagtttagcttttcttggatttttagtaatttgtattttgcaaattttagcaggatttttgattaaaggggaagccactaatcaagcaaacatagctgcacatcagcaacagttgaatccaattattaatataatgctgattgcaattggaccactttttgaagaaattatttttagaggtatttttttcaattggttttttagtaaaccaggcaaaaaatcaacattatttattgctattttcattaatggattaatttttggacttttacatgaaccacaaatcgatttgtttactattgtatatgcactatgtggctgcgtcttagccgcagtgtacctagaaactaaagacctaactttttcttatgtcacccactttagtaataatttagctgtttttttgataagtagtttgtgagaggtgaaattatgaaaaaagataagtatgaagatgctgcagaaaggcttctgattaacggatagtataaattaataaacaaaaatgtaagatggatgtctcattcacttagaagtaggacaaagtctctaatgagatatcaaaacttgaatgaaaaagaagcttttaaagaaattgtacaaacaacgcaagatgctttaagtacaacagattttagaaaatattatgataataacctagtttcataatgcactatatactgtatagaaagccatcctaaagatactttttaggatggcttttgttataatagttaatggcgtttgtaccttccaatatcaaatcctgcattgggaggtgagcgtatgctggatttgttcatttttttgtggggttctgtcttagcgccacttgtagtgaatgcagtttcttatgtcttgcagaagctgcttgatcagtggctaggcaatggtcatagtcataggcgtaaaaaacataagcaaaactcaagaaaacatcgcaaacgtcgctagccttagccgaagtatttagcttttttgctttaaactttggtgaaacaaaaaatcgttactcatttccagacttagagtagcgatttttttgtgtcttgctttttcttgcgtatgcaagttgttcaccttcttgcatttatactctaccacatttttcagcttttttctataattttagatggtatttaaaacgaatgtaccgtcatatctcttaattttagggttgtacttcaattttaaatttaaattttcaccataatttaaaagtttagttccaaaataattatcatgataaaaagtatgatacagtagttaaaaagaagaaaaaagcaagagcttgctgattattcgtaggcttagaggttaaatctgatgtagcacgaaggcaatgattgttaacatgacactaggtttaattacgagtttccagctgcgttttgaacttttgaaataaaactgcatataacgttctcctttctgcaagtagttgccactacttgcttttttagcaaatttaataaaactcatataatttgcttattcataatgtatcccatttatcaatttttgctgagctagctccaaagaagataaaatgtaaattcttctttgtctttgaatggactctctcctataatttttggcttttaaagaacaattttgctaacaatcaggaaacttgttaaaaaaatctgatttatattgacatatcataaatatgatatacaatataaatataagttaaataacttatacatagcatataaattatggagggtatacatatgaaaaaagcttcaaaatttgataaaagctttttggcttggatgctagttgcacaagtggtagtaattattacttacttgtatcttgtttcaactggtttctttaatacattgccagtataaagtaatcataagcaaaacataaataacttatacatagtgtatgagtacagcaaggagaagaaaaaatgaagattattacttttgcagctatcaagggtggagttggcaaaactacactagcttataactatggtgaatggctagctaaccaaggatcacggattttgtttatcgacttagaccatcaatctaatttgacccaaacatatcaaatttatgataatgaatatacagtggggaatatttttctaaagaatgatcaggttaagatccatcagattaatgaaaatattgatctaattgcaggagatatgcacttagacgatattgaagcagacattgaaactaaggttgataaaaacatgctgttatacatgtggttagcagataattatgatactagaaaactagatcaatatgattacattattattgattgtcaccctgatttttcaattgcgacaaaaaacgcagtgattattagtgatgatattcttagccctattactccaagtgaacatggttatagtgctaaatttaatttagaagaacgctttaaggaacttaagcgagaaacaattgattatcgtacaagacagtcactagtagatgctaaattgttatttgttggaaatatgattaagaacaatactagatcatctcgcgaattagtagaagttctacagaaagatcccagtgtaattgtcaagattcctaatcgtgaattatttaaccgttccactttggataaagtggcaattagtacaatgatgaaagataagaaaatgcgatctaggtatggatcattttttaatgagctaaatggtatctttaactccattacaagtaacgtataaagtaaatatgcattacatatatgttaaggatacgtattatataaataaaacatgaggtgactttaatgaaagtgttcacaacaagtggcgtatatgaaatcaaagagcatagggtaaaaattttcccgagctattttgaagcacaagtaaataactctaaaaattttgaaattagaaaaaatgatcgtaattatcaagtaggtgatttactcttgctagaagagtatgatccaacaacagaaaattacacagggcgtgaggttcattgcctgatcacttatatgacgacttttaaacaagcgccaggatatgttgttttaggtaccaagaaattaggtacagtatagtaatgattaaggaggattttctatgagttttaacccaaatcaaggcaaaaagtttgcagaagtattgaaagaaacccctagagttagtgatgactctagtaaggaagcacctgctaaagagtcaagtaattatattaagagagaaaagagaagaccttacacttttagtttgagaccaagtgcaagaaccaagttaacagagatttcaaaagaacatggatatagctcatcttctagttttttgaatgatgtgattttggaaggaaagttggaaatgaaataagaagattaagtggactatattgatcatttaaatatatgtagcgtatatttaaatgatatgtattgttgtaaaaagccatcctagaaatcagagactgtaaaatagtttgtgtaaggatgaatgattccttaaatttatttctttaaacattagaaaaaggagtttctttctcgtatgattggtttgaacaaaaaaacacatacagaaagaagaactccttcatgaatgattttaccaaagattttgctcaagctctattcaatccagacaaaataaatgatttattgcgcaaagagctacaacaggctgttaataacttgttagaagctgaattgactgcctttctgggctatgatccctatgccagaaatggctggaatactggcaactctagaaatggtgcttatttccgcaaagttgatacgcaatttggcccaattgaagtgcaagtgccccgggatcgcaacggtcaatttcatcagcacacgctgcctggctacaagcagcactcggatatcttggaaagcatgattatcaagctttactccaagggcgtgaccaccagggaaatagccgatctaattgaaaagatgtatggcagccattacagtccagctcaggtatcaaatatttccaagcagatgattccaaaggttgaggcttaccacaaacgcaagctaagcgacaagtttttctgcgtctatttggatgcgacataccttcctttgcgccgagaaacatttgagcgtgaagcagtctatattgccattggcatcaagcctaatgggcacaaggaggtcattgactactgcattgcgcctagcgagaacattgaagtctggacagatatgcttcaaaacatgaaatcccgaggcttaaagcaagttgagctttttctttctgatggtgttgttggcatgaaaacagccttggccaggacttatcctaaagctcattttcaacgctgtttggttcatgtcatgcgcaatatctgcgctaaagtacgcgtcgatgatcgtgaaaagatcatgaacgaattcaaacaggtgcatcaacagacaaacaaagaagaagccacagctgtcctgcatgacttctataccaaatggggcaaggtttacagccatgttatcagaagcttgaaagacatagaaccagatctgctggtcttttataactatcccaagcagatcagagcttcaatttattcgactaacatgattgaatcatttaacaatgtgatcaagcgcaaagctaagcctaaggcagagtttccaactgaacagtcgcttgatgcttttattggcattcaggcaatgagctacaatgaccgttatttcaatcgaattcataaaggctttggtcaggttcaggacaccttagaatcctactttgattaaataaataattaaaaaatcaatttacgagaaagatctatttacacaaaagatttgacagtttcagaaatcaagacacataggatggctttttattgtagttatgctgagataaagattctaacaataaaactgatttttactactttatcctttactaagtatatccgctagtatatacttagtaaaggataagtaatttttggaggttttcttatggagattacattgcaaaaatggggtaattcccaaggtattagactttctaagtcactactcaaagatcttggaattactactgaaaaagctacttttgaggtaaaagttaagaataaagaattaattttgaaaagaaaaaaagagagcaagctagcacaacgctttgagggctttgattatgaagcatattgggataaatgggataatgaacatcctggtgaatccaaagaagttgattggggcaagtctgtaggtaaagaaattaaatggtaagaaagtcacctaaaatatagaaagggggtgaaaaaatgattgatgttcatcaaggtgacattatcattattggttttgatccaagtttaggacatgagcaacaaggaactagacctgctttaattgtatctaatcatgactttactaggttaactagatcacttgtgaaagtagtaccgattagtagaacagaaaatgattttccgctacatattccagttcctgaaggcttaaaagtccatggagttgcagaagcacaacaggaaacaactttagacttagctgcacgacactggtacaaagtggatcatgcacctgcatcttttataaaagatgttataaatgctatttcagattcttatgaatttgaagaataaaaaagtcactagcgacaaaatctagtgacacaaaaacgaagcctatatactaacctgacaaaatttagtatataggcttttaattttattgtcaaaattatcaggtatccagaaaggtatccaacttcaaaattaactaaaaccaaccaacatcaaaatagcttattttcaatatataaaagcaactaacattaaccaaaatccaaaatatatctcacccggatcataaattatgcctgtaagcattggtcttacaggctttttacataccttaggtatctatgtgctaaattttactacaaagacaatatttttttacatttgatattgtatgatacaaatatatgacaattattaacttaatcttacattattagtgaatcagttgactaaagtttggaacgagcttattctaaaattgatttccaaaaaataggatcgacaagtgtgaacgacaactatttttaacattatcggaggaattaagattgactacaaccaaaaaaatcattgttagattggcatgcgcgactgttcttggtacggcaggggtagcgctgacacaagtaaatataccacaaactgcagttgtgaacgctgcaactacctctgttgcagcccgcgcacttggagttgatgttgctagttatcaaaacgctgacttgtcaagtcatgcgcaagctggagcacaatttgcaattgttaaagttagcgaaggtacttcctatcgtaaccctaaggcatcaagtcaaatttcaacggctttatcaaataatatgatgccaatggcatatcactttgctacttttagttcaaatgcaagtgctgctgctgcagaagcaaattatgcagttcaagctgcccaagcattcggcttacctaaaggttcatatattgcttgtgattatgaaacaggttcgggcaataacatttacggtggtaaaacgccaacggctaatgcaattattgcttttatggacactataaaaaatgcaggctataagccacttctttatgctagttcatcagttttacaaaataatattgatactaatagtgtaattgccaagtatcctaactcattgtgggtcgcttcatacgctatttcaggtagaattgatagtccaaacttcaattacttcccatcaatgaatggcgtttcaatttggcaatttactgataattggaagggattaagcgttgatggaaatattgctgttttaccattatcaattgacggtaatgtaacttccaacaatggcgcaatttcacaagctccagctaccagcaacaccaattctgctagctcttcaaatgcttcatcaaatacttcgaataagagtacttcatcagatgatgataagggttcagcaactgctggctatgtgatgaagaaatcatatatctataataaaaagggtgagcgtcaaagcggctactatgcagcttatactaatattactcattatggtgtagtgactcttgataatggtaagactgccttaaacatgggcaatggtcgttacattatggcaagtaatgttttaggtaattcacgtgtacttaagcacaatgcttatgtatataataacaagggaaaccgcgctaactggagagtgcttagaaaaggtacgccaattaagacctatggttcacggatgcgcgttaatggtaaaagctgttaccgaatcggacgtaacatgtacgttaaggcggctaacttttaattaaaaaattgaatttatcaagaaggaattaagcttaaaggtttaattccttttttcatgccgttttttgtataattaaaagtattcaggaaacgcctgaattaattaactgatagggatgaaataaacttgaaaaaaagatttatagcaataatattgatgctactgactttaacgggttgtactataaaaagtactacgcctaagaaggctaagtcgtcagttaaaacggttaaagtcgataaacagcaatctaaggaaaaacaggctaagtatcaagtgatagaccaagtttggcgaattcaacaagatggcgttgatatttatggtcatatatatctaccacagggtttagctggtaagaagaaagcagtaattttggctcacggattggcaggaaattaccgtgatctaaccagttatgctaaatatttagctagttgtggctatgttgcctatacttttgattttcctggtggagctaagaatggtcaaagtagtggtgtagatcaattaaagatgtcaatttttacagaagaaaagaatctacagctggtattaaatacaattaaaaataggactgatgttgaccgtaaacaagtgtctttgctaggcgagagtcaaggtggagcagttgccgcaatgctcgcaagtaaatatccgcaagaagtaaagtcattgattttgctttaccctgccttttcgatcactgattatgcgaaagcggcttttaaatcagaaaaacaagtgccagacaagctcaacctatttggcttcacaattggtaaggcctattttgaaaacttgttcaagtataacttgttaaaagaagcaactaagtatcatggtccagttttaataatgcatggtacaagtgacatgattattccagattcttattcaattatggctaataaaaaatttaagcactcgaaattatacttatttaagggtgcaggtcatgattttaaaggtaaatatcatagtcgagcagatactttaattgataaatttttgcagaaaaatgggaaataaataatgaagaagaaataccttggtttattggctttattaagcctattgagcgtttttgctatttggggtcaaagcgttagagctgatgttgattatgatattgataatgttagagccatagcaagagttaataaagatggttcactgacaatgtatcgaacaattaagtattcatttgatagtgatgctcgtggcctttattataagcaaaatctggctgtaaaacagaagttgagcaacattcaggttaaggtcgatggacaaaatataaaggccgcaacaacgggcaaaaataatacgtataaattgcaaaagcagggcaattcttataattttaaggtttatcatcgaattaaggaaaatgataaggttaaagttgagtattcttatctaattcaccgggcaattactaattatcttgatacagctgagctgaactttaaaatagttggtaatggttgggatactgacttagatcatgtgcgtgctgaagtgatttttcctggggcagttaaggggctaaaagcttgggctcatgggccactaagtggttacactcaggttttgccaaaagagggcaaaattattatgactgctgatgatgttgcaggagatagtggtgtcgaagtacatgcgatttttccaactacggtaactagtgctaatcagaatattgttaaagaaaataagaaaagagcaattgaaaaacaagaagcagcattagcaaaagaagctaatcagaagcgtcagcgtaagcagatgcttagtataggattgatgatcatttcagtacttgtcggttttgtggtgataattagaggcttttttattaaaaaagttggggttaagccaaaaatagagcgcgatttagtacataattatgaaattccagatatatcacctactgctgcgcaaattttggatgaagctgataaaccaaatgttaaagcatttacagcttatttgatgcaattagccggtaaaaataaaattaagatcgaaaaatatcaaactaaacatttaaagcggactaattatcgaattactttagtagatgatagtgttttgactgatgacctattagattttatttttaacaaagttggtgatggtaagtcatttacaacgaaagatttgcgggattatacttctaaaaaattgggtaggcgttttgataaatggtgtgacgggcaatataagcaagttgaggataaggacttgcttgataaaaaatataaaaagcagcgtagcaacttccgaacggggatgctcatgggaatgattgctagctttgcgatctgggtaattagcttaatgatggcaaataatatacccagttttgtgataataattggaatcatgatgatcgtcttagaagttgctgcattcatagtgggcaattctcgtttaagtatttatacccaaaaaggtgcacttgagacagatcaagttcgctgctttaagaaaatgctagacgatattggtcaattcaagatgaaagacgtcggtgatctgattttatgggaagacattatgccgtatgctgtagcgtttggtctatccaaaaaggtattgaagcagcttaagattgaatttgcagatgaattagatgctgcaccagttctgttttatagtggattctatagtagcagtagtgacagttttgagcatagttttgaacgtagcttctcttcaggcgtgtctactggtttatcttcagtttccggaagctcaggtggattttcaggtggatcgtctggcggctttggtggtggcagcggcggtggtgctttttagtgagaaatttttatactataattaaactaaaaaaggagggctaaattatgccatttgtacatattgaattaattaaaggtcgctcagatgagcagattactaacttaatgaaggatgttactgaagcagtgcacaagaatactggcgcgcctaaggaacacattcatgtaattatcaacgaattaggtaagcatacttatggccaaggcggcgagtggagagcttaataattagaaattgtagtaaaaggcgactcgattgtgagtcgcctttttatatagttaaatatataaacttgtattagagccttaaagctatgtgtgcataaatgaattatttatttagaatcccacgtaatataatgatgttgatgtctagatatttacgaggaggatttgaaatgaatttaaaaaagaaaattgcaatttctgcaactgcactgactgttgctctctctactgcatttccaattgctgctgcgcaaagtcagccggtaaaagcagtaggtattgtattggttcatcgtgttacagcaggtgaaaatttcgctaattggttcaattggcttagaactcgataaatagaaaaattaggaagcaggcaatataaagattgtctgctttttgcgtaaaaaaatttaatcactaaaacgatcaatcaattaacactacttcataaaaatcagtataattatgttcgttactattagtaagttatacaataaaagtggtgagaataatgtatgattatcgaaataatatcaaaataattttaaataaaactgaggctgatgataaaagtctcgaaaatagtttaagtgcgattaaagctatcctaaatatggccgaagataatacagctgaaaaatctgagactaaatcagtaactcaacctaagaataaaattgcaaatacacaatcaattgcacaaagaaatgcagatttaaagcaaattaagcaattattgattgggctgacagccttaattgagactccaggtgatgaaaaagctaaaaagagttcacttgatgctttacacaagttgacgtttgttccaggcgttggcaagcgctatggcaatgttttgggtaaattggatcaggcaattcaaaaatctaagacaactaaagaagctgttaacaagaaaatttttgaagaagcaatgaagcccaaagagcaacctaagcgcgattatcgtaaaggacgccgctatactgttattcgggctttatcaggctgtaatttgattaatgatagtggtcaaattgtttaccgtattaaagaatcacaaattcactctttgaatttaaagagcggtgacatagttgaagctattgaaaatcgagataatccaaattatgaagcagaagtcttgcgcgtggtgggttatcgcaaattgcgcatgcgtgattatgacccaatcgaagaattccggtatgctgtggtccgcggcaaggccaatcaattagctatcactagaaatattaagggcgaaaagttgagaattcgcggtaaggatatcacgattccggttgattcaagttattatcaaggtgaaaatattcatgttgaagatggttcaattgtagatctagcttggtatacgggtgatgttcgcattaagaaaaatcctgctgaggcagtacagattcgttggatttatcaagttgatccgcctaagaaatcagatctgtcgtatcaaaagaaaaataagtcaaagaaagaagaaacagaagagttaactaaactcgacatgaatttgcactatcagcgggtgggaattgcgattggtgataatcaaaatgaaggaatattagaagggattgtttcgcgctataatgggatcccaattccaatagatgcttttgaaggcaagaagaaggtaatggaacggcaaatcaaagacttagatattgtaatcttgatgacagcttatgctgctcatgatgctacttggaatattcaggaattcgcttcaaagtatggtgttaaatttgccgtttcttcatctaaaggctaccgctcttttgagcgagcattatatcgagctgaaaatggtttacctgcttatgaaggaacgcaatcaatcgattataaagaagttaaaaataaataatttgttaacattattttgtttgcttgagctaacagatgatttttcgttaaaatagtactaactaaaagaaaggacgcttaataatgaaaaacattaaacaacgttcctggatgagatggttggtatttttagcaggacttgaaataatcgcaatatcaatcaatcttttttatggaccgattaatattgcagctggtggctcaacgggtatttctattctagtcgatgcggtctgggggattaatcgatcaattacagtatttgtagtgaatggcttgatgctgattttggcggcaatctttttaggcaaaaagactacccaaaatattgcattaggtagtttgctcttaccagttttgatggaagttacgcctagctttaaagcagtgaataatgacctactagccgtaatttatggtggtgcattaatgggacttggagtttcgctactttatcgcgttaatgcctcaagtggtgggacaacaattccgccgatgattctgaagaaatatttttatttaaatcctgcaactacgcttttatgcattgatatggtaattattttcttgaacatttttgtcgatggttggaatgctttcttcttagcagcattttctcaagtggtaactgccattacgatgcgctacgcggagaccggttttgataaaaagtatcaagtcagaattatgagtaattcagatttagaccgaattcaagatatgcttaaagaagattatcaaggcctgacgatttatgatgttataggtggatatagcgacgaaagcaagcgtcaattattaatcgtagttgatccacgtgaatatgggccacttatttctaaagtacatgagatcgatcaggatgcgtttatcattaccgaaaatgttgcaaaagtgcatggcggtcaatggcgaatgtaaaaaaataattgatcttagtctaaaagcgttgtatgatataagagttgtatttgtggagacctccacatctgcaaccgcacggcttgaggttagaagtcttcttatgtaagaagcaccccagttcggcgagtctaagtatttttttcggaggtgtacaaatgtacgcaattattaagaccggtggtaagcaatacaaagttgcagaaggcgatagcgtatttgtagaaaagcttgatgctgaagaaggtagctcagtaacttttgacgaagttatccttgttgctaatggcgacgacgttaaggttggtactccattagtagatggtgctaaggtaactgctaaagttgaaaagcaaggcaaggaaaagaaagttgtaactttcaagtacaagcctaagaagcactcacacagcaagtatggtcaccgtcaaccttacactaaggttacagttgaaaagattgaagcttaattcagaggtgaaatgaatatgaacattttaggtatgaaattatacgctcaccacaagggtggtggttctactgccaacggtcgtaactcagctggtcgtcgtttaggcgccaaggctggtgacggtcaaactatccacgcaggtactattatttaccgtcaacgtggtactaagattcacccaggcaagaacgtaggtcaaggtggagacgacactttatttgcacttgttaacggcgttgttaaatttgaacgtcttggcaagtacaagaagcaagtttctgtatacccagctgaagaagctaagtaattcagagattaacatgaaaaggcgagtagcataagccacccgtctttttttatggctttttccgcccagaaacatgtataattaaaccaatatcatacaaaaagagggtctctgagatggaaaataggcaagaattattatccttaattaaccagcgaattgagcatgtaactgatttaattaaagaagcaaatgcagatgcattgattatttttaatcaagctaattatcgatatctaaccaattttacaggggaagaagcacaattaattttgactgctagtggcgaacgagtacttttatcagattctcgttttgctggacagattaaagcacaagcacctggcgaaatggatgttgtaatgaaacattctagtgattatgaagaacttactaaggccttgaaaaaaatggacgtcaagagggtcttagttgaaggtgaattcgtttcagcgagtgaatatgaaaaacttaagcaactaaatccagaacttgaatttgtgatggttgaagaattggttgaacgagtacgtaatattaaagatgatcttgaaattgcggcattgcgcaaagcaattgatatttcaatggaaagctttaaaggtattttgccgatgattaagcctggcgttaaagaacgtgcaattggtgctaaattggactacctatttaaagttaatggcggcgatggccctgatttcgatacaattgtagcttccggtgtgcgttcggcttgggctcatggcgttgctagtgacaaagaattgtccgaaggcgatatgattgtcattgactttggtagtttttatcacggttatgcggcagatattactagaactgtttcattaggtgaagttgatgctgaaatgcataaaatctatgatattgtacatgaagcacaacgccgtggcattgccgcggcagttgcaggtaatactggatatgatgttgataaagcagcacgtgattatattacagaacaaggttacggtcagtattttggacacggtatcggtcacggcattggtcttgaaattcacgaattgtgtcaaccagctttaccttttagaactactaaattggtcaataatatggttcatactgtagaaccaggaatctacttgccagacaagggcggtgttagaatcgaagacgatattttggtccatgatcaaacgcctgaaactttatccactttgccaaaggatgaattgatttccctataatagctatttaatttatcgtatttatggtaaaaacgcttcaagattggtaagataataattgtagaaatgagggacttaatatgacaatgatttcagtaaacgaattcaagaatggcttgactattcaatacaacaacgatttatggcgcattgttgaattccaacacgtaaaaccaggtaagggtagtgcctttgtacgttcaaagcttaagagtttgagaactggtgctgtacaagaatatactttccgttcaactgctaaggttgaaactgcagacattcaaactaagtcaatgcaatacttgtacaatgatggctcaagttatgtattcatggatacttctacttacgatcaattagcaattccaaatgaacaaattggcgatgaagctaattacttattggaaaacatgattgttaacgtagttatgcacgaaggtgaaactttaggtatccaattgcctaacacggttgatttgaaggttgctaagactgaacctaacatcaagggtgatacttcatcaggtggtggtaagccagctactatggaaactggtttagtagttaacgtaccattcttcattaacgaaggtgacgttttaactattaacactgctgatggtacttacgtatcacgtgcaaataagtagtttatttgaggtaacaaaatggcagatagttcaaaaattcttttaagtggtgaagaaaacagcgagcaaattaaaattgatccaagtgttctagaagttattttgggtattgctgcagaaaaagttgatggtgttgccggaatgcgcggcagtttgaaatcaggcttaaactgggttttcggtcgtgaagatcatggtaaaggcgtaaatattagtgttgatgacgataataagctaattgctgatatttatgtttatcttgaaagcggcgttaacgttcctaaggttgcaatgacgttgcaaaagaagttgaaggcacaattattgcaaatgactgatcttgagctgaaggcaatcaacgttcatgttgtcggtttagttttcccagaagatgaaaatactgaccagactacatcagagctgtttccggaggacgaagaagaaaaataatgaaccaacacgaaagtcgaaaagttgctatgcaagccgtttatttggctaatcaggagccagatttaactgccgaagaagttgaagcaaaagtcgttgcaacgcttaatttaaaacagctttctgcctattctaagaagttaatcgaaggcgtactagaagatcgcaaaaatttacagtctgaactaactagtcatttgaaaaagggctggcgtcttgaacgtgtaagtcaaactgtggtagctatcatggaagtcgctttgtttgaaatcaatcatagtgatgagattgatgctaaggcagcagttaacgaagctttaaatttatgtgacgaatttgctgagcctaaagagaaaccatttattaatgggatgttagcaaactttgttaaatagcgatgaatagccggcagttttgccagttatttttttacaaaaggagaacgggctttatgggaaagattcttgatggtaaagcatttgcaaatgaattagggcaaaatcttaaagaaaaagttaagaaattaaaagaagagggaataacgccacatttttgcgtaataaatattggggatgatcctgctagcaagatttatgttcgaacaaaaaagcggcgggctgaaaagatgggaattatccaggatatttatcaaatgcccgctgatactaaacaggaagaagttttagcattaattgataagctaaatgctgatcctgagattaacggcttgatggtacagttgccagcacctgaacagattgatgcagatgccttgttaaaaaggattgaccctaataaggatgtcgacgccttaacgcctgcgaatattggtcaactttggatggaaaatcactttgttgaaccggctactgcagaaggcattattgctttattgaaacattatcaaattacgctggctggtaagagagttgtagttattggtcgaagcaatatcgtaggcaaaccagtagcggcattaatgttagaggaaaatgctactgttactgtttgccatttgtatactaaaaatctggctgaaattacacgacaagccgatatagtagtttcagcaacaggacaagcatttttggtaactgcagatatggttaaagatggggcagtggtcgttgatgtgggcatgaatcatgttaatggcaaattagtcggagacgttgactttgataatgttaaagaaaaagccagctatattactccggttcctggcggtgtaggtcctcttacagtacaattcttaatggaagcagttgttaaattgactaggagacaaaatggccgagaataaatatttaacggttactgatttaaattattatattacgcaaaaatttaagaatgatccttacctgcataaggtcttcttacaaggtgaattgtccaacttccgttatcggcgtaattcgcaccagtatttttcactaaaagatgaaaaatctaaaattaatgtggtgatgttccgttccttctttgataaggtgaaatttaaaccagaagaaggaatgaaggtttatgtggttgggtatgtcagcgtgtatggcccacaaggatcatatcagttctatgctgaacaaatggaaccagcaggattaggtgccttatatgagcaattgaagcagttgcaggccaaattagccaaagaaggtctgtttgatccagagcataagaagaagttgcctcattttcctgatcgaattgcagtagttactagtgcttctggggcagttattcacgatattatggttacagctaatcggcgtttcccgcatgctgagattgatttgtatcctgcgcaagtccagggtgatactgcagcggattcattagtgagagcaatgcgccagattgccgctcaaggcgacaagtatgatgtcatgatcatcggtcgtggtggtggctcactagaagatttgtggccattcaatgaagaagaggttgtgcggcaagtttacgcaatgcagatgccagtaatttcttcagttggtcatgaaacggatactaccttgtgtgatttggtggccgatgcgcgtgcagcaacaccaactgctgcagcagaatatgctacgcctaatacattggacgaaattgcgcatattaagcaattaaccagccagttggtagctagcatgcaaaatattattcgttcgaaacgtgagcgcttaagtcgggtgcagaattctgtcatcctgcgcgagccgactagactgtatgatcagcagattcaacaagttgatcaattaaaacaaaggctgcaaaatagtatgcaaaatcggttgacccattctgtccaaggttatcaactgttgaagcagcgtttgtttagcgttagtccagataagagaatcggccagatgcagcaacaagagcattttttacagcaacgactgattgataatatgcagcactatttgaaaaataaacgcaatagttttacccaagtaatgcagcagttggatgactatagccctttgaagacgctagagcgaggttttgtttattcaactgatgaacaagggaaaaccattagttctgtgaaacaagttcaaaaggatgatcatttgcgattgcattttaaagatggacaagttgacgcagtggttacaaaggtaaaggaagaacaaaatggcagtgaagaaaaataattttgaagaacaattaactaatttggaacaaatcgtgcaaaatttggaaaacggaaatgttccgttggaagatgccctaaaagaatttcaggagggcgtaaagattagccgtgatttagaaaagaagctcaacagtgctgaagaaactgtggctaagttgattgatagtgacggcacagaacacaaattagatccaaataacgcatcagcaccagaggaataaatatgacagcatttacttattttaaagatgaatggaccccagtaattgatgattatctggctaagcatttggctagtgaggttgaagatcaaaagatcagtcagattatggcctactcagtgatggctggcggcaagcgcttgcgtccgttattgtttttagctacgttaaatgctttaggcagaaagattgaagaacctgaaattaggattgcctgcgggattgaactgattcacacttattccttgattcatgatgacctgcctgccatggataacgatgactatcggcgcggtaagctgactagccacaaaaaatggggcgaggctgaggcaattttagctggggatgcgctcttgccgatgggaattcaatggattgcggaaggcagtaagtcggcgaaattggtagatttaattaccaaagcagttggccctaatgggatggttggcggtcaatatttggatattgattcaactaacaatgctagtgttgcgggtgatgccaagtttatcaataagatggaatggctgaagaccggttgcttaattcaggctagcgttgagatggctgcagtttatgcaggagctagtgatattgaacaggtaaaattagtcgattttgccaaaatttttggtcgttcataccaaatctatgacgacttggttgatgtcgttgaaactagtgcagaagctggtaaggcaacccacaaagatcaagctgaaggtaaaaacaatactttgactttattgggaattgaccaaagccgcaaagaattaactgatttgatcaagcaggcacaagatgatttgcatgggctcaaaggcgaagtacttgctggcttcttagatctttatcaaaaggtgttataaatggcaaaacaaagagcagatattttattagcagaacaaggaatttttcattctcgttcagctgcccaaagagcgattatggcggggctggtttctgatcacaatcatcaacgaattgataagagcgggactaagtttcctgaaggggaaaagttttacgtgaaagatgatggtaagaaatatgtttcgcgtggcggctttaaactggaaaaagctcttaaggtctttgacattgatttaacaaataaaatttgtttagatattggtgcatcaactggcggttttactgatgttgctttacaaaacggtgctcagatggtctatgccttggatgttggctacaaccagttagcttggcaattgcgggacgacccgcgtgtagtggtgatggaaaagcagaatttccgctattcgaagccggaagattttgatcaaggactgccagattttgcaatgaccgatgtgtcctttatctcgttagatttgatcatggcaccgatgtatgcaattttgaagaatcaatgtgatgccgtttgtttgattaaaccacaatttgaagctggccctgagaatgtcggtaaacacggtattgttcatgatcatgaagtgcacaaggcggtaatcgagcacaccatgcaaaaggcattggagatcggcttcaatgttttaggcgttgattattcaccaattaaaggtggcaaaggcaatattgaattcttgattcatttacaaaaagacgaagcaaatggtggccgcaacttatggcaagggagcccagctgaagtggttgagcgcgccgtaagtggtctataggagtgaagctatgctagttgagctagatatcaaaaactttgcaattattaaaagcttaaaggttcgttttcaagaaaaaatgacggtaatcatcggtgaaactggtgctggtaagtcaattattattgatgctgtttcattactgatgggtggtcgcggtcaaaaagaaatgattcgttcgggtgagtccaaggcgattattactggcttgtttgaattggatgatcaaaaagaaaagatcgcggaattgtgtgatcaatatggtttgccgcacgatgacgatcagctggtgattagtcgtgaattagctgtcaagggcagaaatgtagtccggattaacgggcaattgacgacgattaatgttttgcgcgagattggtagctatttggttgatattcacggccagcatgatcagcaaattttaatggaccaagatcgtcagattgatttggtggataactatgccccagattcttttaagacggatttaacaacttatcagaaagattttactgaatggcaaaagttgactagtcaattgcgacatttgcgtcaagatgctcaagaattggcacaaaaacaggatattttgcaatttcaaaataatgaacttgaagcagctgatctagaggatccacaagaggatgaaaagcttgaagaagaatataatgagctgaataattatcaaaaaattgcggatactgccaattatttcatgcaattgtacgatgatgatgagcatggtattgcaactttacttggagatgcgcaaaatgctgcgactgatttaactgaatttggttcaaaatttaaggattttgctaagacagttgatgatggagtttatgctttaaatgacgcccgcagtgaattatcgaacttaatggatgcaatggacttcgatgaggaacgttttcaatacgtgactaaccgcttggataccttgaattcattgaaaaagaagtatggcccaaccttggctgatgtgtttgctttttatcaaaaagtacaaaaagaactcagtcaatttgaaacaggcggccttgatgaggaaaaattgcaagcagaagttgccaagattgaagaaagaatgacccaagaagctagagatctgcatttaatacgcgaaaaagtggctcattctctggaagagcagattaagcaagagttagctgatctctacatggaaaaagctcgcttttctattaattttgatgaaacaaagacatttaccgataagggaactgatgcgattgttttcttaattgcacctaatccaggtgaagatttaatgccattagttaaaattgtttctggtggtgaacaatcaagattgatcttagctttgaaggcaatcttcagccgagttgaaccagtgggtaccatgatttttgacgaaattgatacgggagtttctggccgagtatcggctgctatcgggaaaaagatgcactcaatcggtcgcaacaagcaggtaattgcaattacgcactcaccgcaagtggctgccgcgggtgatcaacgctacttggtagctaagcaagtaaaagatggttcaacctttactcaaataggcccacttagcaaggaagaaaccattacagcgattgcacagatgatggctggacaagatgtaaccgatgcagcaaagaagaatgctgcagatttgattaagagtattaaagatgactagtattagtaaattttggcgtgatttttgtgtagaacatcaagtaagtcctacagcattagaaggtgcttttgcttttggagctaatagccgggatgcagatattcttagtgatttggtcaaaagtggaattaagacggcaacgactagcctgtattctgcgcaagaagatgtaccggttgtagggatgtacgcaattgttttaaatggacgaaatgaaccagtttgtgtgattcaaaataagactgttgagattatgccatttaaaaatgtctcagctgagcatgcctatttagaaggcgagggcgatcgctcatatgaatcttggcgtaaagtacacgagaaattttttgcgcgcgaatgtcaagaactgggacgagagttcacagatgaaactgaagtagtgtgtgagacattcgagaaaataatttagtaaaggagcagacgattttgtctgtttttttgtatgcaaagagaaaacttgaaaaagaaacaattttagtgcaaactagatatattacaagttaagaggagttcagcatggcagataaaggtttattacttgtgctttctggtccttccggcgttggtaaaggaactgttaaaagcgcgattgttgaaaacaaagtctttccatttgaatattcagtttcaatgactacgcgtcaaccgcgaccaggtgaggttaatggccaagattatttttttgttagtgaagatcgctttcaagaggctattaaaaatggtgagttgttagaatataataaatatgtcggtcactattatggtacacctcttgcaccagtgaagaagatgcttcatgatggcaaagatgttttacttgagattgatgttaatggggcacaaaaagtacgtgaaaagatgcccgatggcgtgtttatctttttaaccccaccagatctacatacgttacatttgcgtttggaacaccgtggcaccgagtcagaagatgtaattcgtggtcgaattaagcaagcgcgcaatgaaattttggagatggaagactatgattatgcagtagttaatgatacagtagctaatgcagttgatcatattaaagcgatcgtcgatgcagaacatgtcagtgttaaacgtgtaattgatgactatcgtaagatggtcaaggaggattaattattatgagaattacttacccatcaattgataaattattgtcacgtgttgattcacgctattcattatctgttcttgccgctaagagagcacatgaacttgaagctggtgatccaccaactttggaacattttaagtgtgataaggctgttggtaaggcacttgaagaaattgctgctggtaaagttactgttgacccagctcatgccgaggttaacctcgaagattaatttattgaccttcatcctttggggtgaaggtcttttttacaggtgattaaatgattgctcaggttattgttgatgtagctgcacggcaaacagaccgtatttttgaatatcatattccaacagaattagaaaaggatattgcgattggatcaagagtagttgttccgtttggtcctcgtaaagtgcaaggttttgtggtggggatcactgatcaaagtgaatttaaaggtaaacttaaggatttgctagttgtggtagatgagatgccaccgcttacgccagagttggtaaagttatctgctgatttagcaaaaaatattttttcttaccgaattaaaattttacaagcgatgctaccttgggtaatgcgagcaaattatcgcaaattgctagtgccagctaatgatagagctgccaaaatgccgctgtttcagggtgatccaattgatttaaataaaattacggatctggcggagattaagcaattccgcaaattattgcaagatgatcaagcaaagattgagtatgtggtagaaaatcgagccaagaagaaaaaagaaaatcaatatgaactagcattaaaaaaagaggaatatcccaaaatttacaatactttacgtcaaaatgcggtaaagcaaaaaaagttattgatggatatcattgataatgcagcggattatcccaaaagccaaagccagctagaaaaacagcttggattgacggcggcgagtttgaattctgcgattaccaaaggttggttgaataaaaaaagtgttgaggtttatcgcgatccgttatccggatttgatgacggagaacataaaacagcggttaccttaaatggtgagcagcaaggtgctttgaaccagatcacccaagcaattgaacagcgccaggctgagacttttttgttggaagggattactggtagcgggaagactgaagtgtatttacacgctattagcaaggctcttaaacaggggcgaaatgcattaatgctggtgccagaaatttccttgacgccgcaaatggttcgtcaggttaaggcacgttttggtcaagaggtagccgttttacatagtgccctatctgagggagaaaaatatgatgagtggcgccgaattcgtcgtggcgagactaaggtggtcgttggcgctcggagtgcagtttttgctccactagataatattggtttaatcgtgatcgatgaggaacatgagtcttcatataagcaagaaaccgatccacgttataatgcacgtgatgtggctatttggcgtagtaaatttcataattgtccgttggttttaggaagtgcaacaccatcgttgagtagccgtgcacgcgcccaaaaaaatgtctatcatcttttacggttaactgaaagggctaatcaaaagaaattgcctaaagttaatttgattgatctaaagcacgtgcagtttgctggtggtcaatttgatttatctgttgagctagtagatgcaataaaaaagcgtttggcaaaaaaagagcaggttattttaatgctcaatcgacgtggttttgctaattttatgctttgccgtgaatgtggttttgtattaaaatgtcctaattgtgatgtttctttaaatttgcataaggatactaacagtatgcaatgtcactattgtggtcatactgagccagtacccacacgttgtcctaattgccaaagctcgcaaattcgttttttaggtgcaggtacacagaaggtacaagaagaattagaagagcttctgcctggtgcacgaatcttgcggatggacgttgatacaactagaagaaagggtagctataagaaaattctagatgcctttggtgctcatgaagctgatattttgttaggtacgcaaatgattgctaaaggattagatttccctaatgtaactttagttggagtaatcaatgccgatacaggattatggctttctgactataatgcttctgaaaagacttttgaattattaactcaagtagctggccgtgcaggtcgtgctgataaggaaggggaagtcttaattcaaacttataatccagagcattatgctattcaactagctcaaactcaggactacgaacgattttatggctatgagatgaatatgcggcatgctggtaactatccaccatatttttataccgtgctgatttccattgctgctaaaaaagaacagaatgcagctcgtgaggcttttaggattaagaggtatttgaatgagcacttgcatgagccaacgattattttgggaccaacgccaagtgcaatttctcgtgtaaaaaatcaatattattatcaaatactggtaaaatataaaaaagaaccaaatttaaatgaattattacaccatgttcaagattccgcgcaggaagctaagaaatatggtttaagtatttttattgataatgaaccagagagaattatgtaaggggatgctttaatgacatcaataatatttatgggaacaccggaattttcagttccagtacttgaagggttaattgatgaaggctatgagattaaagccgtggtcactcaacctgataaaaaggtaggacgtaagcagaaaattactaagtcaccagccaagatcgcagcagaaaagcatgatttgccaatctttcaaccggttaagttgtctggatcagacgaaatgcagaaattaattgatatgcatgcagatttgattgtaactgcagcatatgggcaatttttaccaactaagtttttgaattcggttaaaattgcggcagttaatgttcacggctcacttttgcctaaataccgtggaggtgcaccaattcaatattcactaattaacggtgataaagaaactggaattaccattatggaaatggttaagaagatggatgctggtgatatttatgctcaagaagcaattaagattgagcctgatgataacgctggcactttatttagtaaattatcaattgttgggcgggacttattgcttaagactttaccagcaattattgatggctcaattaaaaaggttccacaggatccagaaaaggtcgtcttttcacctaacatcactaaagaacaagaaaagcttaatgttgatatgacagcagaagaggccaacgatatgattcgtgctttgaatccagatcctggtgcttatttgatgattgaaggcaaacgtttcaagatctggaaggcagaaattgcatctgattcatcaagtttaaatgccggctctgttgttgctaacaaaggacgttttgccattagttttgctgataattcagtacttaacttacttgaagttcaaccaagtggcaagaagagaatggacatcaagagctttttaaatggtcaaggtagtaagtttgtcccaggtgaagaaattgtcgatcgataagagtgcacgtgcagtcagcttagagacattgatcaaggctcctattctaatattagtttgaataacagcttaaagcactctaacttgtcaattgcagaccaaaatttagctactaatattgtttatggcacgattcagtatcgattatttttagaatatcagttaaaaggcttagttaggacaaaactgaccgaaaaatatattaagccattattgttaatgtcactttaccagttgatttttttggataaagtgcctgatcgtgctgtacttgatgaggctaataaacttgctaagcaatatggcaagcgacattcagctggctttcggttggtaaatgggattttgcgttcgtttactaggcgcggggtgattttaccagctgaaaataatccagttaaatatttaagtgtcaaagagagcgtacctgaatggttagttcaatatttaattgataactggggcctagacaaggcaaaatcagttttaaacagtattaatgagccagctaaaaacagtgtacgtatttcaaagttggcagataaagagcaagtttttgcccagttagagcgggataactatcaaccacaatggtctaagttatcaagcgatgatgtgattttgagtcacggtggcattagcgaaagtgatttgtttgaagaaggcaagttaacaattcaagatgaagctgccagtttagtcgtagaagcttttgactttgaacaagatgagcatgtgcttgatgcttgttctgctcccggtgggaaaaccgtgcaaattgccgaaagcattgttaatggtgatgtgactgccttagatattcatgataaaaaattacgtttagtacgagataatgcccagagaatgcacgttgcaaataaggtaaagactaaggcatgtgatgcacgtaaggctacagagatttttgcggcaggtgaatttacaaaaattttagtcgatgccccttgttctgggcttggattattgcgtcgtaagcctgaaattcgctatactaagagacaacaggacttacaaaatttacaaaaaattcaattggcaatcttaactgcagtaagttcactcttaaaaaagaatggcgagttggtttattcaacttgctcaatttcaatggaagaaaatgaagaggtagttaagaagtttttgcaagcacatcctgactttgaactagttccatttaagttaactaaacttgaatcaaagacagggatgttgaaaataatgcctgatctagatggcaatgatggatttttcattgctaaatttaagttacgaggttagatttttgattgaaacagcatacgcttcgagtattggtaaggtacggaaaagcaatcaagattttgtaaaagtttttaaaaatcaaaagggaattgtcttagcaattgtctgtgatggtatgggcggccatcaaggtggtgacgttgcttcaacaatggcagtcacccatttaggacataattttagtatgactgactttgcagatgctaatcttgctcataaatggcttgatgtgcaattaaattctgaaaatgaaacaattttaaagactgctgataagtttcctgacttaaatggaatggggacaacgattgtattggcgtttgcatttgataaaaatgccttaattgctcatttaggtgattctcgggcttatagttattctgaaggtaaatttgtccaattaactgaagatcattctttggttaacgaattagttaagatgggtcagattactaaagaacaagctaaacaccatccccagaaaaatattattacgcaagcattaggcgtctcaagtacgattgatcctgaatttgatgagatcaagatgggggaaaacgacattattttgctctgtactgatggcctaaccaattcacttagcgatccacaaatccaacaaattttggcaactaaggagcttagcttaagagaacgttgtaataaattgattagtgaggccaatcgattaggtggtggtgataatattactgtctgcttaatttggaacaaggaggacgagagcagtgatcgataaaggttatctgcttggggaacgttaccgcatcatcgataccttaggtgaaggcggaatggccaatgtctatctagcggaagatattatcctgcaacgtaaggtggcagttaaaattttacgccttgatttgcagaatgaaccgcaaacccaagctcgttttcaaagagaggcattagctacaagtgaattaagtcatcctaatattgtttctgtacttgatgtaggtaccgatcatggtttgccatacatggtaatggagtatgttgatggtcctaatctaaaagaatatattcaaaaaaattcacctttggatttaaatgaaattattcgaattatggatcagatattgagtgcagttgcattagctcataagcacaatgttattcatcgtgatctaaaaccacagaatattttgatggataagcgcggcaatattaaaatagctgatttcggaattgccgttgctttgaatcaaagctcgattacacaaactaattcagtaatgggttcagttcattatatgtctcctgagcaaacgcgtggcggaatggttactaaacaatctgatatctattccttgggaataattttatatgaattgatcacaggaactgttccgtttaacggtgatacaccagtggcaattgcactgaagcatgcgcaagaaccaattccttcaattcgcaagaaagattcaagtgtaccacaagcgctggaaaatgttgttttaaaggcaaccgcgaaagatccacgagatagatatgctacagctcaggaaatgaaagcagatttggatagtagcttggatcctgaacgggcagatgaaccggtttttgtaccatatcatggtaataacgatgataaaacaattgtattgcccggatttaagccacaaaaggaagaaaaagaagtgggggagccagcaaaaaccgaatcagtagaatcaagcaagccagtaaagaaaaagacttttttacagaatgtcaaaagtcacaaatggtggtggctgatctcaattattgccgcgggtttaatcatttttatgatgattttcgctttaagtggtactggaaataaacgacaggatgttaatattcctgatgtaactaatattgcagaaaaagcagctgagagtaaacttgaagcagcaggcttacaggttggaaaaattattaggcgacaatcagatgatataaaaaaaggccgggttattgcgacaaaaccaactgcaggtaatagtctagagcggggaaagagcgttgatttaattgtttccagcggttctagcatggttaaagttcctgatatggttgggaagaactatgccgaagcggcagaaaaattagaaaatatgggctttaatgtagttagagaggaccaatattctaataaagttgacgaaaatcaagttatttctcaaagcattgctgcaggtgtagaggttaagccgacgcagactacaattacgttgatagtttcacgtggcaagcaggctagatcacattcaaatatggttaccttgaaagacttaagtaattattctttgaagagtgctcaagactatgccaaagaacatggcctgactttacaaatcaatcaagaatattctgatgatgttgagaagggcttagtaatttcgatggagccaggtccgggtactaaggttgagcgtggttcaactgttaccatcaagatctcgaaaggtccaaaggaagacaaggaaactactgtaactaagacctttaccgttaactatgttggtgatgatctttctaagagtgagaagcctgataatgataaaggaagcaataactctgagtcagaatccgttaatggcaagggtgatcatgtccagatctatattaaggatgatgatcattccttgaacaatatttatcgtgacttgtatattaagcatgatatgagtttctcgattccatttaacattagagaaggtagtggacaattaaaggttgttcgcaatggcgatacagttttgaatgaaaaggtgactaaataaatgaaactagcgcaaggaaccgtcgttggtttgattgctggttattatgatgtagaaaccgctgcgggtatcgtgagaacgcgtgctcgcggcgtttttcgtcaaaaaaagcaaaaaccggcagttggcgatcatgtggaaattcagatagatgataaaggaatgagctatctggtgaaaatcttgccgcggattaatcgaattgggcgaccagcagttgctaatgtaagtcatgttttgttagtaatttctgcagtagaaccggatttttctgtagagctgttagatcgttttttgactttcttttcttggcaaaaagttggtgtaacaatttacttgtctaaagcagatttgctatcagaagcaaagttaaacacaatcaagcaagctttagcatattatcaaaaaataggttatcttgttttcactgattatcatgaaatgcaaattcagattcctaaaatgatcgaaaaaaatcaaatttggactttagcaggacagtcaggtgctggtaagtcaactttgcttaaccatttaaaaaaagatgctaatcaagcgactggtgcgatatcaactagcttgaatcgtgggaaacatactactagaaaggtcgaactttttaagttaggcgcgggctttttagcagatacgccaggtttttcgtcaattgatttgacaccaatcaagttgaatgagttatgtaattactttgttgagtttaaaaaggcaagtattcactgtaagttccgcggatgtcagcatttgcaggagccaggctgtgaagtaaagaagttacttgaagccagagaaattctggaaagtagatatgaggattatttggctatgcggactgagattagcgaaggtcgcataccggaatatttaaaatagaggtaatagctgatgatgattgcaccctcaattttgaacgcaaataatattgatcttaaaaatgatattgaaaatgcagtccaggccggaattagccgttttcatattgatattatggatggacattttgtgcctaatttatcttttggaccgcaactaatcaaagatttcaagcgtgaatttccgatgacagatgctgaaattcacttaatgagtgatgccccagataagttggtaccagcttttgttagtgcaggagcagatttggtcgaactacactatgaagcaatggacaagcctaagttatattattggttcgattatttagcttctaatggcgttgatgctgctttggcaattagtccagatacaccagttgaagtggttgaaccgtatttgccattactgaaacaagtattagtaatgacggtcaagccgggatttggtggacagagttttcttcctgaatcagttaatcgaattaagtcagttagagagattgtcggctctgattttgatattgaggtcgacggcggtattaatgatcagactattaaattagctgaaaatgctggcgctaatatatttgttgttggttcatacttgtatgaaaatggtgatgttggcagtcaagtacataaattagaaaagattattaagtaatgaaagcatatgcattgttgggcggtccaactgaattgtggcctgaagatattgaagaaaagctggctcaagctgatttagttattggggttgatcgtggtgccttgtttttagaagaactgggaataatacctgatgtggcagtaggtgactttgattctttacacgaaaatgacttaagccaaatagaaagtaatgttcaagacattcgttattctaatcctgtcaaggattggactgattctgagctaatgttgcagattgcttttgaagattatcatgtggatgaattagtgatttttggtgctacaggtggaagattggatcattttttgatcaatctattaatgttgctaaatcctgaaatgagattatatgcgaaaaaagtaacgttgattgaccaacaaaatctaatttgcttttttaatgcaggcacgcatgttgttcaaaaaagaaaaaattattcttatattggttttgcagctttaacagcaatcgaagattttaatattattggtgcaagatatgagttgaagcactattctgggaactatcctcgtgttttttcatcaaatgaatttttgcctaatagtaatgaattcaggattagcttgcaaaatggtatgattgcagcaatttattctaaagatattaatcgttttcatgatttataggttaaaatagaactatagaaaagaaacaagggaattcaaatgaaatatattgactttgaaaaagatattgctggtttcgaaaacggtcgctacgaagcaagacttgaccgtgcaaaataaaatgtagaagactacatgtacaagaaccacgttcacatttttgataaaaagaagaagaaggaagtagctactatcaatggcttagctagaaatgtaacttatcaagatttggacttgccaactaaggtgggtgaaatgattactgagtatgcatacacgccaattgatgaaagaatggccgacgaaattcctgatgacgataagcatcacaatattatgaagtaaagtaaaacggtaagaagacaaaataaaatggtcttcttaccgttttttatataaatcattaaaataagtaaaaaaataagcttgcaagatcagtgatctaacaagctcttggtctattaggcacgagtaactttaccagactttaaagccttggttgaaacccatacgcgctttggcttaccgtcaacaagaatgcgaactttttgaaggtttggcttccaagcacgacgagttgagttcaatgagtgtgaacgtttgttaccgaatgtagtcttcttacctgttacgtaatcttttgccatttgctaaacctcctttaattgtgatgtcatacttaattagattatcatatgttttcgcgcaattcaatactaaaaggattttttcaggtgtattttaattattgattatgtcgttactatgataaaataataaacgtatatatagataataagacggaggacgaaacatggctgttaagatcaagacaaaagatggtttgattgatatttcaaacggtgtaatcgcaactgttgttggtggcgcagctacgtctaactatggcgttgtaggtatggcatcaaagaatgccattcgcgatggatttgacgggattcttaatcgtgccaattataagcgcggtgttgttgtcaagtcagaagataacgaaattacggttgatgtgtacattattgttggttatggtttgaagatttctgaagtaagtaagaatgttcaagatagtgttaagttcaatttgaagaatcaattaggaatagacactaaggccgttaatgtcattgtacaaagcgttaaggtacttgacgaataacacaagcggaggttttaaatagtggttttaaatgagatagatagtaagcaatttagagatatggtacgtgttgccactcatcgaattggtaaaaatgcggagtttgttaactctttgaatgttttcccagttcctgatggtgatactggtactaatatgaacttaaccattgaaagtggtgctaaggctgtttcggaaaatccaagtactagtgttagtgatttaactgaaagcttggctaaaggtatgctaatgggtgcccgtggtaacagtggggttatcacttcacaattattccgtggcttttacaaggctacccaagggatgaagaccttaactgcacaggaattagcaaatgctttttcaaatggtgttgctactgcttataaggctgtaatgaagccagttgaaggtactattcttactgtagctcgtgttgctgcacaagccggtgctactaaggccaatgacaccgacgatgtaactgaagtaatgaaagctgtagttgaaggtgctaagaaggctcttaagtcaactccagatttattgcctgttttgaagcaagttggtgtagttgactcaggtggtcaaggccttttgtttatctatgaaggctttttggaaggcttaatgggtgaaaactttgcagatcaatatcaacctgacgaaaatgaaatggatgaaatgatcaatgcaatgcaccaccaatcttcagttcaaagccaattggctactcaagatattaaaaatggttactgtactgaaatcatggttgatcttgatgccgatgtgccaaataaaaagaagtttgatttggaagaatttagaaagcacttgtctggcttgggcgattcattattagctgtttctgatggtgaaattgctaaggttcacgttcatactgaacaccctggtgatgttttccaatacggtagtcagtttggtcaattaggcaagatcaagattgataacatgagaatccaacacgaaagcatcgttgaccaagatgaagaacaacaagaagcagttgattttgcagtgatcgcagttgcttcaggtaacggtattcgtaagttatttgaaagcgaaggggtaaaccgtattatctcgggtgggcaaacgatgaacccatcaactcaagactttattgatgcaatcaagaagtctggtgcgaagaaagctattgtcttgccaaacaacggtaatattgttatggctgctaagcaggctgctgaagttagtgatattccggttggtattgtaccaactaagactatttctcagggtttaaccgcgatgctttcattcaatccagatgcatctgttgatgaaaatgtggaagctatgacagaggacttagatacggttgtttcaggtgaagttactcaagctacccgtgatactgaaatcgatgaagtagaaattcataagaatgactacttgggaattgttgatggcaagattaaggttgacaatgctgatttaattaagactactgttgatatgattgaaaagatgctggatgaagattcagaaattatcacaattatgtttggccgtgatgctagtgaagagcaagcacaagaagtagttgaacaacttgaagccaaacatgatgatcttgaatttgaaattcatgatggtggtcaacctgtatatcacttcttagtatcagttgaataacaatgattgataatgcattatttgctcctgtcacagacttaaagggtgtagggacaaagactacagctgcattaggaagcttaggcatctatagtatttatgatttgcttttttactttccttttcgttatgacgaattacaaacattaccgttagatcaaatcatggatggtcaaaaagtaatgctaaagggaatagtagccactgaagcgtttgttagtcgttttggctataagaaaacgcgcttaagtttcaagatgagaattgaccatgatgtgatcatggtcaatttttttaatcagccgtggttaaaaaataaaattgagatcggacaagaagtagctatttatggtaaatacaatgttgcccggcaaagtttaacggcctttaaattcgtagcagccaaagaaaatgatagtggtatggcgccgatttatccggttaatcgacatgttaagcaaaaaaaattagtagatctaattaatgtggctattgacgattttattgatcaagtgcaggatattgttccggaaaagttgcggcaagaatatcgtcttttaaaagaccaagtaattattgaaaaaatgcaccaccctaagaatagtcatgaggctgaactagctaagagaagtgcaatttttcgtgagttttttatttttgaattacaattagctttattgacccgtaatgatggtaaacaaatgggttatgcaaagaaatacgatctgacagaaattgctcaattaactaaatctctgccatttgaattatcagatgatcaaaagcatgtggttaatgaaatctttgctgatatgcattctgatggtcaaatgcggcgacttttgcagggtgatgttggttctggaaaaactgttgtagccgtttatgcgatttttgcagccattacagctggctatcaggcggctttgatggtgccaacagaaattctggcaactcagcatttcaaaaaaatcgatgaattgttgcgtcctttaggtgtgcgagtagctcttttaacaggcaatacaaaaacactggagcggcgtgagatctaccgtgaattaactgatggcacgattaatgtggtaattggcactcatgctttaattcaagatagtgttatctttaaaaaattaggtctagtcattattgatgagcagcaccgttttggtgtaggacaacgacaagctttgattaataaaggcgatcaaccagatattttggcaatgaccgctacgccaatcccgcggacgctggctttgacagtttatggtgatatgacagtctctgaaatacatcatttaccagccggaagaaagccaattatttccacatggaaaacaagtagtcaaatgaaggaagtctatcgacaaatgcaagagcagctaaatcaaggctttcagatttacgctgtgacaccattgattaccgagtcagagacgttagacttaaaaaatgcagaagaattgcatgaaaaattaagccatgattttcctaatcacaaggtagtcctgcttcatggtcaaatgccaggtgcgcaaaaagatgagattatgactgcatttgcagctggtgagatcgatattttagtaactaccagtgtgattgaagttggagttgatgtggctaatgccaatatgatggtgatttataatgctgatcgttttggcttaagtcaattgcaccaactgcgtggtcgaattggtcgaggacaaacacaaagttattgtgtctttctagctgatcctaagaccgattcaggtaaagcaagaatgaaaattattgcgtcgaccaatgacggcttcaaattagctgaagaagatttaaagatgcgcggtgaaggtgatttgtttggtaaggctcagtcaggattgccagaatttcgtgtgggtgatgtagtaaataactacgatacattggtcgttgcgcaaaaagaagcacgagctttggttgcggctgatcctgatttatcagatccaggacataaggcacttaagcaagtgctagaatataagcaattagagcaaaacagaatttagaaaagattgtggtgaatatatgagaacaattgcaattgatgcgatgggtggcgaaaatgccccagatgcaatcgttaaggcggttttacaagctaaaactggaatgcctgagactaaatttttattatttggtgataaagaagcattaagaaaactaatccctgaagatcaaattaatgatcaattaggagttgtacctacaacagaagttattgctgatgaagatgaaccagttaaggcaatcagaaaaaagaaagactcttcaatggttgtggcagctaacttcgttaaggaaggaaaagctgatgcgttgctttccttaggcaatactggtgcattgcttgcttgtggaatttttattattggtcgaatcaaggggattgttcgtccaggtttgatgcctactttacctgttcaaaatagtgacgatggcttcaatatggttgatgttggtgctaatgctaagagtaagccagaatatcttttacaatgggccgaaatggcttcgtactatgctgagaagattcgcggcattaaaaatccgcgagtaatgctcttaaataatggagctgaaagcgacaagggtgatgatgttcaccaaaaggcctatgaattgcttaaagaaagtaatttgaatttcttaggtaatattgaaggtaatgaattgctattaggcaaggcagatgtggtagtaaccgatggctttaccggaaacgctgtacttaagaacattgaaggaacctctagcgtcttgcttcatttattaaaagatagtttattaaatggcggtgtaatgactaagttaggtgccttaatggtgaagggctcgttatcgagcttaaaatctaaatttgatacggctaaatatggcggtgcagttttactaggcgttaatgcaccggtagttaaaacccacggtagatcaaatgaacgtccaatttatttcactcttaagcaagtagataaaatggttaaagaaaaacttgttgcagattttagagacgaattcgctgaaaaatagtacaatgttttattaaaaaggagaagttttatgtcagaagaagaaatttttaataaaattaaagacatgatcgctgataattttgatgttgataaggataagatcactgaagacactaattttatgaacgatttggatgctgattcaattgatttggttgaatttatcttgcagctagaagatgaatttggcgcagaaattcctgatgatgaagctgaaaaaattaaaacaattggtgatgctgtttcatatattaagtctcatcaaggataattttctaaaaaaagccgtgtcgtgatttgcatacgaccggctttgtgtttataattagaaaataaatagaaaagattaaatgcttttaataaaaaagctcgagatggaggaatgacctttggagaagcagagtgatcttttattagatattcaacacctgcatacggcataccgtttgcaagggaaattctatgatgcggcagacgatgttaatctgactctgaagcgcgacgagattttagccatcgttggtgaatctggttgtggtaagagtacaattgcctcaagtatcattggattgtacgaccataaaaatactaaagtaacaggggacattctttacaatgaattaaacctagttggcttgaatgaatcacttttcaataagattcgtggggacaagatcggaatgatcttccaggacccgttagccagcttgaacccattgatgcgtgttggtgaccaagttgctgaaactctttattaccacactgatatggacgaaaaggcacgtcacgcacgtgtcattgaattgtttaatcaagtaggaatgccaaagcctgaagaaatgtacgaaatgtacccacatgagttgtctggtgggcttcgtcagcgtgttgtaattgcgatggcgattgcatgtaagcctgaagttattattgccgatgaaccaacaacagctttggatgttactattcaagctcaaattttggatttgcttgaagatattcaaaaacaatctcactcagggattattttgatcactcacgacttaggtgttgtagcagaaactgctgatgaagttgcagtcatgtatgctggtcaaattgttgaaaaatctgatgtaaagacaatttttgaaaacccacttcatccatatactcgatcattacttaactcaatgcctcaatcagacgatacggatgaagatcttcatgtaattcacggtactgtgccatctttgaagaatatgccacgtactggtgatagatttgctgcaagaattccttggattcctgctagcgcacatgaagaagaacctaaggtgcatgaagttgcgccaggtcactgggtaagatgtacttgctggaagtcattccactttaaaaatgaaaagacggcaagtggggagtagtttatggcaaaagaaattattcaaatcaaagatttaaaggtctattacccaattcgctccggtttttggaacagaattactgattatgttcgtgccgttgatggagttaatttttcaattaatgaaggagaaacttacggtttaattggtgaatcgggttctggtaaatctactactggtaaagcaattgttggggttgaaaaagttactggcggccaaatcatgtataaaggtttggacgtaaccaaagcaagtaaccgcaagaagcttgattacaacaaggatgttcagatgatcttccaggattcaatgtcaagtttgaacccaagaaagagaatcgaagacattattgctgagccaattagaaactttgaaaatttaactacagatcaagaacgtgatcgtgttcaagaattgttggatatcgtagggatgccaagtgatgcaatttataagtatccccacgaattctctggtggccaacgtcaaagaattggtgtcgcacgtgcggttgcaacgaatccaaagttaattgtagctgatgaaccaactagtgcgttggacttgtcagttcaagctcaggttttgaactttatgaagcacatccaacaacaatataatattgcttacttattcatttcccatgacttaggtgtggttaagcatatgtcagaaaacttagcgattatgcaccgtgggcgtttggttgaaataggtactcgtgatgaaatctataagcatccgatgcatatttacacgaaacgtttgctttctgcaattcctcaagttgatgttgaacatcgtgctgaacataagaagcatcgtgaacaagtcgaaaaagaatttgaagagaaccaaaataaatggtacgacaaaaacggtcgagtattcccactacaaaaagtttccgatactcactatgttgccttgccaaatactgaaatagaagaaattagggagggtaaagaataatgtggaaaactgtcttaagacgtcttttgattatgatcccacagttgatcgttttgagtatcattgtctttatcttggctaaaatgatgccaggtgacccatttagtggattaattaatcctaatacagatcctaaggaaattgctcgcttgagacaagctgctggtttgaatgatccgatttgggttcagtacttcagatgggttggcaacctatttcatggtgatttaggtactagttatattcagcatgtttcagttacttctttaattgctgatcgtgctgttaataccttctggctgtcattattgactgttgtgcttacttatgcattagctattccaatgggtattactgctggtcgtcgtgaaggacattggcaaagtactttaattcaaatctttaactacatcacctttgctattcctggattcgtattttatattttaggaatctggttattcggttataccttaggatggttcccaatttcaggatcagtttctggtaatgtatcaggattcttcccagttctttggagcagaattgatcacatgatcttgcctgccattttatgtgcgataatttcaactacaagtacagtacagtatttaagaatcggaattttggacaataaggttgaagactatgtcagaaccgctcgttcaaaaggtgttcctgaaaaagttgtgtttaataagcatattttgagaaactcattattaccaattgctgctttctttggtaatacaattactggacttcttagtgggtccgttattattgaaactgtctttagttaccctggtatgggtaagttgtttatggattcaatttctcaacgtgattacacaactttaacagctttgattttactttatgggattttaactttaattggtaatttgctttctgatattatcatgagtattgttgacccaagaattagaattcaatagggaggagaagaaaatggctaaagataagaaaatgaagaatgataaaagtcagcaggtttcaactcctccatcaggaatccgtattattttccgtgaaattttacgagataaggcagcactaaccgctttttgtattgtgattgcaattttattagtgtgttttgttggttctttattcttaaataaggcacaagttactgaaattaacattgcagaatcttactatgcttggggcgaaaatggtcaccttcttggaacagatgaaggtgggcgtgatattctccaattattaatcatgggtggacgtaactcaatcatgattggtatttcagtaactttgatttcaatggttgttggtttaattgttggtattttcgctggttattatgggggagtcatcgatgccattattatgagaattgttgactttattcagatcatgccaagtttcccaattttgattgtattagctacagttactccaaattacaatgcttacactttagtagggatgatttcactgtttggatggactgcgtcagcccggtattacagaagttttgtcttggctcaacgtgagcgcgagtatgtaatggcttcaaaaacatcaggttctagcgatttacaaatcatgtttagagaagttttacctaacatttcttcaatgattataattgacttagttttgggtattgctggtaatattggtgttgaaactggactttcatttattggttatggtttacctattactacaccttcattaggtactttaattgggtatgccactgatccagttaacgtaacgacccgtccatggctttggttgcccgctgcacttctactcttagtgatttcattgagtattaactatgtaggtcgtgctttgcaaaaggccggagatgcccgtcaacgtgaaaactaattgattaaataaatttatgtaagaatagtatgtgggtagctatcatgctattctttttgttatgattaaaaactttttaatatatttttctaatttaaacttcacattacgttaattatatgatattattttaacataaatttgattcaaaaaagtccacattaatttggaggtaattctaatgaaaaaaattaaaatgttaggctccatcggtttgattgctggtgccgctttatctttagtagcttgtgggaacaagaacaatgataatactgatgcttcgaaagaaaagttccctgaagcagtaccaactaaggctgcaaaagagggtggtactttaaagtacgccatcgaaactgatacgccatttaaaggtatttttgaaggtactttgtcaactgacagtattgatgacactgttagtcaatttggtaatgaaagcttagtcggtcaagataataatttcatgattaaagatggtgccgctaagtttaagttagataataaagctaagacgattacttttacccttaagaagggcgttaagtggtcagatggtaagccagtaactgccaaggacatggaatacccatacgaaatcattgctaatccaaagagtggttctcaaagatattcaactcaattagaaaatattgtgggctttaaagaattccacgaaggcaaagctaagaaaatttccggtttggaaatgcctaagggtgaaaatggcaatactttggttattcactttaaggaaatgtatccaggtatgaaccaaattggttcaggctacttctggaaacaagccactccataccactacttaaaggatgtaccaatgaacaagttaatgtcatctgataagatccgtaagaagcctttgttctttggaccatataagatcgataaaatcgttcgtggtcaatcagttacctggtcaccaaacaagtattactacaagggtaaaccacacattaagaagatcgttgaaagcgtaatttcttctaactcagcaggtcaagcaattaagtcacacaagtttgatattattgatgttgttaactcacaatggcgtcaagttaagggtactaaaggctttaactatgttgcgaacactccattatcttacagctaccttggctttaaggttggtaagtgggacaagaagaagggtatcaacgtaatggataagaacgccaagatgaacaataaggctttgcgtcaagccattgcttatggtatgaatgttaaccaagtaaacaagcgttacactcaaggtttgactttcagaattcctactttaatccctaaggcctttggtgaattctttgataaggatattaagggttatacttataacattaagaagggtaacgaactacttgataaggcaggctacaagaagaagggtacttaccgtgtacaacctaatggtaagccattgactattcacttggcagcaatgagtggtagttcaacccaggagccaatcgttcaaaactacatccaacaatggaagaagatgggcttgaatgttaagttaactaccggtcgtttgattgaatttaactcattctatgataaggttcaaaacgatgatccaagcgttgacatgtttatgggtgcttggagtttagctggtgaaccttcacaaaacaacttatacggtgaacacgcttcattcaactttacccgttttgtaacgccagagaacaacaaattgattgctgaaatgaatagtaagaaagctatgaacaacgagtatcgtaagaatgttctttggaagtggcaaaagtacatgaacgaggaagcttatgttgtgcctatttctaatagttactcaattacagcagttaacagcaagttaactggctattcagttgctactgacactaatactgatatgtggcaaagagtggcatttactaagtaattactcgaagcaaaagaaataaaaaacaacctgaaattaattcaggttgttttttgtctgcctatgaaaactggtataatttataaagtacaaaggggcaattttatggtaagtacaaaatttctaaaaaaattaaaagacgattataatatcgaatttaataatgaaaaattattagaagaagcatttacgcattcttcttattcaaatgaacatcctaatgatggaattcgcgattatgaaaaactcgaatttcttggtgatgctgtgctagaattagccgtttcgaattatgtttatcttcattatcctaagttgaatgaaggtgaattaactcgtttgagatctaatattgtccgaactgaaggattttcagaattcgccattgaatgtggttttcaagatgagattcacttgggcaatggtgaagaaaaagctggagcacgacaccgcaaaactttactggaagacgtgtttgaagctttcaatggggcacttttccttgatcaaggaatgccagcagtggaacattttcttcatttaacagtttatcctttgattgataagggtgaattcgatgattcgcgcgactataagactgacttgcaagaagtattgcaacaagatggtcccgtgaatatcgaatacaccgttattagtgaatctcaattaccttcacactttgttgttgaactaaaaattaacggaaaagttgaatcaaaaggtgagggtcacaataagaaagcagctgaacaacaagctgctaaggtcgctttacaaaaattagaaaaataaggggatgaaaaagtgccattaacagaattagtgctcgatggttttaaatcattcgctgataagacaactattcattttgatgatggaattaccggaatcgttggtcctaatggttcggggaaaagtaacattactgaagccgtacgttgggtaatgggtgaatccagtgctaagtcactacgtggaacgaatatgaaggatgtcatctttgccggtagtcaatttcgtaagccgctcaataaggcggaagttactttagtttttgataataaaaagcgtgagttggcttttgattcagatcaggtctcaattactagaagatttctgcgatcaggtgacagtgaatttttaattaataatcagcaagtgcggatgcgagatgtgcggacactctttcttgattctggaatttcacctaatagcctagcaattatttctcagggtcgagttgatcaaatcttgaattctcgtcctgaacaaagaagagtaatctttgaagaagctgctggtgttttgcattttaaacaacaaaaagaagctgccaaggcgcaaatggagaaaaccaaggataatttaattagaatcaatgacttggttaaagaacttgaaggtcgattggagccgctgcatgagcaaagttcgctggctaaagaatatcaatttcaaaagaagggactagatcagaaattaaaaagtctattagcttttgaaattgaggatttaaaccggcaaaaagaagaagtccaaaaagcagcagataggaaccaaatccttttaacaaaactggataatgaagtaaaaggttcgcaaagtgctgtttctgaaaaacgggcagaatatcaaaaaattcaaaatgagcgagagcaaacgcagagtgaattattaaagctaagtgaccaattatcacagatcaatactaacttgcaggtcgcacagcaatcacaacagtttaataattcaactagggtagaaactcaacgtcaagttgaagaattgaaaaatagcttggttaagctaaaggatgaattgtctgaactgcagcggaataaaaagcaacttaagcaggagcaagatgctttacaagagcagcatgatcaattgactggtgaattgcacgatgatccagaagaattgagtaagcgactagaagattgtcgtaacgactatattcaacttttacaagatcaggctacaactaataatcagattgttaatctgaatactgaattaaaacgtagtcaggcagacactacttatcaaaatagtgatgtaagcaagcagctaaccgatgctcggactgaactggaaaagctgagaactgaaggcaagcagctgacagttaagcggcaaaaggaaaaagaaaaatttgcgcaagttaatgatcaaaataatgatttaactaaacagattaatcagattcggcaagccgttaacgcagagcgcagtcaattagagaaagttgaagcacgacatgaagctttagtaaatattcaaaagcggcatgagggttattactacggtgtacgtaatgttttgaatcatctatctgatttccctggtgtgatcggagctgtgggtgaattgattacatttccagttgagctagaagctgcaatgacgacagctcttggcggtggcgtacaggatttgattactgaaagcagagttagtgctagggatgcaattaatcaattaaagcgtagtcgtagtggacgagctacttttttaccattagatggcttgcgtcaatacactattccacagtcaactatcactactttgcaatcttttagtggctttaagggcgtagcaagtgatttagttgaaagtaaagccgatcaagatattactgctgcgattaattatttgctgggtagtgtgattatcgttgatacgattgatagtgcaatgtcaatttcacgtcgagttaaccgctatcggattgttaccttagatggcgatgtgatttccccaggtggttcgatgactggtggtcaaagaaaccaacgtaataattcaccactgcagacggcaactgaaattaatcagttagagaagcaattacagactttacgacaaaatttggctgaagatcaagaacggttagatgagctagttactcaaggtgaaaaagttgcggctaaattgcaacaactgcgtgatactttgcaggagactaatcaagcgattaatgaagctgctatttctttccaaaatcaagaaaaggaagtaaagcggctaactgatgctaatagtttatataaatctcgagtaaaagaacaacaagatcggattgctgctttaaagaaagaaatcactcaggctaatgatcagcaggaacaattggctaagcaaaatgaagtacaaaagggcaaaatgaatgacttgcaagaaaagattaagaacttcaatagcttaagtcaacgtgtacaagaggaattatcaaagcttgatcctcaaattgcagtttatactaataagttggaaaacttagctagtcaggaaaaagaaaaaaatagtcagatcactaataatcagaagcaaactgatagcttagagcagaaattaattgaattaagtcaaaatggtgaattatcagttaagaagaattttgatttacaaacacaaaaagctgaaattaagcaaaagaatgaaactctgcaaaagaagctgaatgaacttagtgcgcaattaggacaagttgatgcgcagattaatcaacttgaccaagttgccagtcgtaattatgatttacgcaaagatgcagcaattgaacaagaagattactcagtaaagattgcgaagtttaattccgcaattgatcagcgcttgtcaactttgagtgaagagtatgccttaacgtttgaagctgctttagagcaagcagaaggcgaaaatactgaagaaaagcgcaatgaactggctaaaagcgtgaagttgcatcgcatgtcaattgaagatattggccaagtaaatcttgattctattcaagaatatgaagatgtgaaaaagcgctatgactttttgaatggtcagcaaaatgacctgttaaaagctcgtgatgaccttgaaaagtcaatgaacgagttagatgaagaagttaagacgcgcttcaagagtacctttaatcaagtagcatctagctttaagagtatttttccagttgtctttggtggcggtaaagctagattggaactcactgagcctaataatttgctagaaactggaattgagattatcgcacagccgcctggcaaaaagcagcaacgtttaagtctgctttctggtggtgaacgcgcgttaaccgcaattactttgttgtttgccatgttgcaggttaatccggtaccattttgtgtacttgatgaagtagaagctgccctggatgatgcaaacgttactcgttttgcgcaatttttgcttaaatacgatatgaaaacccaattcattgtgatcacgcatagacgagggacgatgcggcaggctgaccaactatatggtgtggttatgcaagaatctggcgtttcgcaagtattgtcggtatcattaaaagaaatgaagaataaaaatgaggtgaaatagttgggtttatttgatcgaataaaaaaatcactctttggtaaaaaagacgaagaggatgaaaacaaaaaagaagaaaaacagactgagcaagaaaatgaagctaagcctgaatcagaagataatgatcaagaatctgaaaaagtagttgatgaagctaaatcgaaaactgaaactactgatgaagaagaacaaacagtagaagcacaagaagactctgaggtagaaactgaatctggtgatgaagaaaaagcagtagatttagattctaaacaacagcctgaagaagttaaagtagaagagactactgagactgaaatagaagaacaagttgaagaaactgaagtttctgatgaggagccaacagaatcacaagaacagctttatgaaaaggggctagaaaagactaacaagggatttggtgcaagacttaacgccttttttgccaagtttagaacagttgatgaagatttcttcgatgatctagaagacttattaattgaatctgacgttggctatgaaactgctgaacaattaactgatgaattgcgtgaagaggctaaattgcaaaatgctaagtcacgtgatgacttgaagcgagtaatcgttgaaaagttggttgacctttatgataaaggcggcaatagcgaagatgagcaattgacgtataatgctgaagctaaacctaacgtttacctatttgttggtgttaatggtgcaggtaaaactactacaatcggtaagttagccaaacgttttaaggatgaaggaaagtcagtaattttagctgcggccgatacctttagagcgggtgccgttgaacagctagttgaatggggaaaccgtgttgacgtacccgtagttactggtaaagaaaaggctgatcctgcttctgttgtttatgatgcaactgaacgggcaatcagggaaaaagctgactatcttttagtcgatactgcgggacgcttacaaaataagaagaatttaatggctgaattggaaaaaattcaaagaacaatcaagaagcttttaccagatcagccaacagaaaccttgcttgtgttagatggttcaaccgggcaaaatgcgcttttgcaagccaaagactttgacaagaccaccgaattaactgggcttgttttaactaagttggacggctcatctaagggtggtgtagttctagctatccgtaacgaaatgaatttgccggttaaattggttggcttaggcgaaagagctgaagacttagctgattttgatgctgcaaattatgcgatcggtcttttccacggcttggtctagtgataaagttagagatgtaaatattgttttataaggagaattttatgaaagaatatagtgcttgtactactatcttagttggtaaaaatgcctcgattgatggcaccactatgattgctcgtaatgatgacacttttcgtccaattaccccacaaaagttcattattgagccagcccgtcatggtgaaaagaaacatattaagtcatggttaaacaagtttgaaatggacttgccagaagatgcgcaacgtgtaccagctgttcctaatgttgactacaagcatcgtggctactacgatgaaagtggaattaaccaagaaaacgttgcaatgtcatgtactgaatcaacttatggtaatgagagaactttagcatttgatccacttgttaaagatggattagatgaagactgcatgcagacttctgttttgccatacattcattcagctcgtgatggtgtacaatatttaggtaagttaattgctaagtacggttcaccagctggtaactcagttttattcagtgataaagatgaaatttggtacatggaaattgttacaggtcaccactgggtagccgagcgcattccagatgattgttacgctgcaactggtaatcgagttgcgattgaacaagttgactttgataatcctgattacttcatgtggagtaaaggtattcaagaatttgttgaagaacaccatttgaacccagatcatgaaggctggaacttccgtcatatttttggtacctatactgaacaagatcgtcactacaacaccaaccgtcaatggtatattcaaaaattgttcaatcccgaaattgaacaaaacccacaagatggcgatattccatttattcgtaaggcagctaagaagatcactaaggaagatattcaatttgctttaggttcacactaccaagataccccgtatgatccatttggtaagggtacggatgaagaaaaacatcgctaccgtccaatcggtttgaaccgtacgcaaaatgctcatattttgcaaattagaagtgatgttccagcagatcgtgcggctattatgtggttatgtatcggtggtccaactttcactccatttgtaccattctttgctaatatgaatgatactgatccttcatataacaatacctcaatggattacaatatgaatgatgcatggtggtattacaagtcatttgcagctatcgttgaaagtcattacccacaatttgttcagcttgatactacttatttaactgaacttaaccgctacttcagaggtcgagttgaagaaattatttctggtgcagaaggtaaatcaggtgatgaattaactgaatatttgactaaggaaaatcaaaagactgttgcccatactcgtaaggaaactgaaaagctttggggtcaaatgatgattgaatcgatcaacatgtccaaacttactttcaatatggatgaaaatctttaataaattcaaaacagctcgaaaaagggctgttttttataatatgtgaaatgaaaggaatatagacaatggcagaaggtactattggctcattttttactaagattaacaatgaagttgaaaaacaaatgaataacgatttaaaaaatttggtattaatgctaatgaattggaaatgcttattgaattaaatcatcatcagcatggcaaaacttttgaaaagttggctaaagaattgcatgtaactaatgacaaggtcaaatctttgacaaaaaaattggctgccaaagatttgtgcaagaaatttgaaaagcaccgtgcagaaactgaccaaactattacagggatgctcagtaaagatgaaactcttggcttggttaatgtactgaaaaagatgcttaagtcgagtgaagacaataagtaatgtaaaatagtagaactccagaagttaattacttttggagtttttttatgcaaaaattattgacaaatctttaatataatattactgtattaagtaaatagaacagtaatattattagtgaaaggataaaaatgtcagaaattttaagagtggatcaagtaactaagacttatggtaaaaaaggtgagaagcaataccaagctttaaaaggaattagctttgccattgaacaaggtgaattcgttggcattatgggtgcttctggttcaggaaagacaactttattgaatatcttgtcgacgttagataagccaactagtggacatgttttagtcaataagcaagacattactgcacttaagaacaatcaaatggcagattttcgcggaaaagaaattggctttatttttcaagatttcaacttgctagataatttgactaatcgcgagaatatagccttgccattatcgcttcaaggagtgaaggcaaaggagattgacggaaaagcaatggcgattgccaaaagattgggaatagaatctatcttggacaaatacccagctgaaatttctggtggtcaaaaacagcgtgttgcttcagctcgagcattggtccataatccggcaattttatatggtgatgaacctacaggagctttagattcacaatcagctacggaattattgaaaacaatggcagacttgaataagaatgatcaagtttcgattctgatggtaacgcacgatccttattcagcttcttacgctcaaagaattttgttcatcaaagatggaaaaatcggcaaagaaattaaaaaagaaaataagaccagagaagaattttatcaagatattattgctgaattaggtagacgttagagggaggtatagacgtgctttggaaattatcactaacagggctaaaaagtcgctttaaagattatgctgttttgtttttggggctaactctagctgctgcaatcttttatatgtttatgaccattgcaattaatccagcttttcttaagggttcaatggccattgccttttcaattacccagatggtctttatttttgggatagcgctattagctattattaccctagtctatattgtttacgcaaatagttttttgcttagtatgcgtaaaaaagattatggtacttatatgattctaggagcgagaaatagtaaaattggccgtttaatttttacagagacggttgttattggtttactcgctactgcattaggaattttaattggtatcggcttgactcaagttgtttctcagttattaatctctcaattgggtttgcagctgcataaattcttaggcttttatttaccggctattttatggacagttgttttctttgtagttttattcttcttggctgcaatttggaatcggtacaaattggtaagtactagtgtaatcaagcttttgcatgaggatcaaaaaccagttaagttacgtaataaccgaatctggaaagcaactgaagtaattctaggccttgcccttctagccattggctactgggcaatgtgggattaccatcagttgcaaattaaatcggttgaaattggttttgtcactattttggctggttcatattttgtatttgattctgtatttactacagttatcaatgctttacggaaaaataaaaagtttaaatacagtaaactgcattcttttaccttaggtcagctaaaatttaggttaggtgattacaatagagttttaactgttatttccttgctttttgctctagcattaggtgcgatcactgttggattaaactttaataatatgacagagactgctcttcaggcaacatattatgatgctgtgttgtataaaagggatgctaaagttaatcaacaacttaaaaaagttgccgttagaaaacaaacgactttgaattataaggtcaatgggaaaaagaagtttcctgttctatatgttactgaccaagaaattgctaagaaaaaaatcaaattccaatctggtcgaaagaacggcgaccaaatgaattggaagacaaagacgattacagttgcaggtgtaaagaataaaaaacaagagatgaatttccaacttgctagtttaacaccttattctgattatgaggttaaagttgtaactccagctgaatatgtgaagattcctggaaaaaacaaacaagtaaccttgctattaatcaataactttagaagtaattttaataatattgaaaaattgcaaaagatgtcacttgaccagacagttactaaggatgcacaaggagtttatgtttctcagaataattctaaatctgctcaatatcgcttagtagcaagcgttgcgtcaggttttgaatttatgggcttcttcttaggcttagctttcttagctatgttagcttcaaccttaatgtttaaagtgctatcaggagcaaacagtgatcgtcctcgatatgaaatgttgtggaaggtcggatcaagacgtaagttattaaagagctcgattaaagcggagattggtaccttgttcgctttaccggctgtcttgggtgtgattgatgtattatttggactacaatttttcaaagggattttagctaatccatacgataaaatttggattccatttacgatctttttagtattgtatttgctttattacttaattacagtaaaactctatgaaggaattgtattgaaaaaataatggtacgaaaaaagatctgcaaaatgcagatctttttaactgtatttagattaattttatttattttgcttatttaaaattgaatgacgaacaccatagctaaagtaaatgattaagcctaaaataaaccaaataccagcataaagtttagcttggtagtcaagccctaagaagacaattaaagcagccatgaaacctaaagcaggtaaaactggataaaatggcatcttgaatgaaggatcatcaatgtcttttccttcacgtggacgcaacttataaatacctaaagaaacaaacataaaagcaattaaagtaccagctgaaaccaattgtgacaacatggagaaggggaaaaatgctccaagtaaaattgctacgattgttaatgtccataaagcattattaggtcgacgatctgcattcaacttgcccagccatttaggaagcatcccgtcacggccaaatgaatagatcaatcttgaaccggccatactcatcccaatcaaagcagtgaacatccctaaaacagcaatggtttggacaatgatggcaacaattggatgaccagcaaaccgtaaggctaaacccactggttcagcggaattagcatacttctgataaggcataattccaattaaaactaaactaactccgacaaataaagtaacagcaatagcaagtgagcctaaaatgctgcgaggcatagttttttgtggattaattgcctcagctgagttagcggcgattgaatcaaagccaatgtaagataagaaaatcattgaaacaccagcatagattccttgccagccaccgaatggaccgttagcagtcatcttgtatttcggtataaatggggtgaagttaacttttttaattgcaaaaacgccaacggcaataaagagtagaatggctaacacctttaatacaactaaggcattttcaacgcgagctgcccttgaaacaccatgaccaattaataaggcaactaacaagattgaaactaaagaaatgatatcaataataccaccgttattgccaaaggcgttagataatgacgcgggtagtttccaacctaatggtgcgattagagctctaaagttagcagaaagccccgaaccgacgaaagccaaagcaatgaaatattctgctagaagggcccatcctgctacccaaccccagaattctcctaaaactacgttgatccatgaataagctgatcctgcaaatggcattgcagcagccatttctgcataggcaaaagccactaaaccagcagcgattgctgctaaaataaaggaaatcgctactgcagggccggtatgcttagctgcaacttcaccaggtagagtgaaaattgaagcggagacgattgttccaacacctagagctaagaagtcctttacttttaatgagcgcaccaggtgtccatctttattttcatagacgcgtggatcttctttactgttcattctctgccaaagattcacaacgcaacttcctccttatgttaaaatatattcatctaattataattaaaagtacgttaaaaaatcaactattacatatttgaaattccactttttttagaaattgttatctaagataggttaatctagcactagcttatgacctttgttatactaaagactggtgaaaatcaatggatgaactaactaaaaacgaggagctaggcgatttatatgcctactatggctctttattaacccaggggcaacaatcttattttgaagactattactacaatgatttgtctctaggcgaaatagctgctaatcatcaagtatctcgtcaggctgtctatgataatctcaagcgctcaagtaaaattcttcagaactatgaagagaaattgcatatgaagcgcgacaacaatcaggttgaagatgtcttggcagatacgcttttatctttagataatggtgatagtgaagctgctaaaaaagaaataaccaatttattaaatcaattgaggggagaatagcccatggcttttgaaaatttaagtgaaagaattcaaaaagcattaaaaaatttaactggcaaaggtaaggtctcagaagaagatattaataaggctagtcgtgaaattcgacttgctttgttagaagccgacgttaactttaaggtcgttaaggactttattaaaaccattaagaaagaagcccttggcaaggaagttcaggaaagtttaaacccaggtcaacaagtaattaagatcgttaatgaacagttaacgaagatgatgggtgaagaagcagttcctttaaacaagtctaagcatattccaactatcattatgatggttggtttgcagggaactggtaagactacgactgtgggtaaattagcctatcatttgcaaaagaccgaaaaggcccgtccgctgttgatagctggcgatatttatcgtccggctgctgttgatcaattgaaacaaattggtgatcagttaaaagttccagtatatagtgaagacggagaaaaagacgtagctaaaattgttcaagatggacttgcagaggctgaaaagaacaagaatgactatgttttgatcgatacagctggtcgtttagaaatcgatgaacctttaatggaagaattagagcgggtaaagaaagtaacccatcctgataacattcttttagtcgttgatgccatgactggtcaggcggcaacagatgtagccaaaggctttgacgaacgccttgatgttacgggcgtgattttgactaagttagatggtgatactcgtggtggtgcagctctttcaattcgtgcggtaactggtaagccgatcttatttactggtcaaggtgaaaaattaagcgatttagatgttttccatccagatagaatggcatccagaattttaggtatgggtgacatgctttccttaattgaaaaagcccaacaagattatgatgctaaggaagctgaaaaagtcgctgaaaagatgcgggaaaatacttttgacttcaatgattttgttgatcaattgcaacaagttcaaaaaatggggcctcttgaccaaatcatgaagatgattccgggactagctaataatccgcaattaaagaatctaaatgttgatcaaaagcaaattgatcatactgaagcaattgtttattcaatgactcctgaggaacgagaaaatcctgatatgcttaatccaagccgtcgccgaagaatagctgctggttcaggtcgtcctgtagttgaagtcaataggatgattaagcagtttaagcaaatgcgcgacatgatgagtaaaatgtctaaaggaaatatgaagggcttgagcaatttgcctggaatggattcgccaatggctaagatggcaatgcgccgaatgaacaagaatttcaagaaaaataagaagaagcgtttacgcaaggtaaaaagattccattcttaaaaaataaactgttaaggaaaaatactttacacctgttaagtttggtggtatattattaatcgttaagttttaggaggaaattaatttatgtcagttaaaattcgtatgcaccgtgctggtgccaagagaaagccattttacagaatcgttgttgcagactcacgtatgccacgtgatggtcgcttcatcgaacaagttggttactacaacccagtttcacaaccaaaggaattgaagcttgacgaagacaagatctttgaatggttacaaaaaggtgcacaaccttcagacactgttagatcacttctttcaggtgctggcttgatggctaagttgcacgatgcaaaatacaataagtaattttgctattaattaagagcttgatgccgtgtgcttcaagctttttttatacctaaaggagaaaaaatggaatattacgatgttgctcggattttaactacgcacggtttgaatggtgaagttaaagttagtataattactgatttccctgaagatcgttttgctatagggatgcatttggcaatcaaaggtgaaacttctcaagttttaactgtggccaagagtagaccttttaagcaattttggttagttcaatttgcagagattactgatattgatcaagctgaaaaattaaaaggaaaaatactagttgttagtgaagccgaccgcggtgaactacctgaaggcgtttattattataaggacatctttgactgtgatgtcattgatgaagaatccggtaagcgcttgggtaaaatcactgatattgaatcgcctggtgctaatgatatttggctagtccatgaagataatggtaaagagtattggattcctaatattgcatcggtggttaaaaaagtagatgtagctaataaaaaagtctatgttgagttattggagggcttacgcgatgaagattaatgtattgacactttttcctgatatgtttgctcctttgcaagtttcaatgttgggacgtgggcttgaagataaaaaatgggagcttaatttagttaattttcgtaatttcactaccgatgtacatcatcatgttgatgatacgccctatggtggtggcgctgggatggttttgcaaattatgccgattaaaaaagcacttgactcgttaccatccacaggtaaggtaattattactgcaccacaaggtaaaacttttaatgaaaaaatagcgcaaagctgggccaaagaagatgaattaacctttatttgcggacattacgagggctttgatcagcgggtttatgacttggctgacgaaactgtttcaatcggtgattatgttttaactggtggtgaattgccaacaatgagtatgattgatgctacagtaagacttttacctggtattttgggcaatgcagctagtccagttgaagaaagcttttcacatgggttgttagaatatccgcaatatacgcgtccagcagattttgaagggcaaaaggtgccagagatattgactagtggcaatcatcaaaaaattgcacaatggcggcataaagaggctcttagaacaacatatttgcatcgacctgatttgctcaaagaacgagttttaacaactgaagaaaagaaaatgttggcagatattaaagcagagcttgattaagcaagctctacttgatatactattcatcgtggcgtgaccacaatgaataagtttaggggtgttccgctggcgttggtacgttgatgaatgccgaagaaggagaaaagtatattatggatccattaattcaagaattaactaaagaacaacttcgtgacgatattcctgcattccgtgcaggtgacactgttactgttcatgtacgtgttgttgaaggtactcacgaacgtattcagttgttcgaaggcgttgtaatcaagaagaagggtactggcatcggtgctacttacacagttcgtaagattgcttcaggtgttggtgttgaaagaaccttcccagttaacgacccacgtgttgctaaggttgaagttaagcgtcatggtcgtgtacgtcgtgctaagctttactacttacgtgaacgtcacggcaagtcagcaagaattgctgaagcacgtcgttaatcataacgtcaatcataaaaaggtcagttccagtggaactggctttttttctacccaaaagttgtatataaaatgctatgatggagttatggaatgaatgaggtgaaataaatgaagttcaattgcaaatttgcacttgtggcagcaaccgtattgacagtagcacttatattatcttttcccaatatcacgactacggtacaagcaacgacgaagaaagcccaagcagctaagaatacaatccgggtaaataaagcaccaataatttatgatcgtgcaggtaattataattcgaaatatcatcaaaatatcaaagctggtactcgtttaaaatatagtggcaagacttatattattcagcagcgctttgcagctgggattcctgtgccaactagtcgaattattggtggtaagctttactattcgattggtaaaggaggctatgttaaagaaagcgatgtgttaacctggcttggtaacacaaatacggtcaagttacattttcggcacaagaaaaattatatttatgataaaaatggtaaaaaattagttagctataatggtggcaagaattattttactaataaacaaaaaccaaaaattgaggtaccatactataattcgcctaagcaattatttaatattggtaagggtggttatattgatgccagccaagtaactactttgaatggcaagggaaccgtgtttttaaataataatgcacctatttatgatgcaacaggcaagcaagtcaagaataaaaatctaaaacaaggcacggttttaaactattatggtaaacctaagaaagcggctgctaatactcaattttattattatcaaaataaaactaagatgactttacctgcaattcaacaaggtgatcatacttattttcagattagtaaaacacaatatatcaatgcggcagacgttgctttagtagatggtaagacgttgtgggataaaggacctgtgagtgtgtctttaataaatgatgcatatgcgtatactgccaaatttaagcaaaataaaaaggtgctttatcgtgctggcgctaaactaacggttgatagaatcaaaatagaaggtaaaaaatcacctcaactttatttacatgttaaaggtaccaaaaactatctttattggagtaatgaaaaagactatggcgcatcaccattagattatcgtcacggttcaactaatttaatattgcagacactgttgcataattagtctgtgtgtaatacttttaaactgatatcataaaggactattatcttaatagaaggtgatagccttttattttaaaaagatcacaatgataaaatggctgtatagtagtaatgatgaaaaaagattgtgaagaaattcaactgtgaaactgctgtgaaactaagataaaaatcacaaaactggcagatatctattactaatcttgatataaaggcatttgttattgtgaagctatttttgtaaaaaataatattaaatgtggaattagcgttagaatcaatagttatccacatttgtaaatgtccccagtaaagtcgagtaaaacaaaaatttaaaagaagatggaaaaatggattatccgaaaaaactgattgacgaagtgaaagaacgatctaaaggcatgcagctagaaggaattaattctgtctcgggtccccaacatcctttattaatgattgtcggtgaagctcctggtcgaaatgaaattgttaataatattccctttagcggggatgcgggtaaggaattggataaatcattgaagcagattggtctgacacgtgatcaggtatatattacatctgctgtgagaagtcgaccttttgcaatcaaaaaggtttttagcaagcgtgaaaataaagaagtaatcaaatatcccaatcgtaagccaaccaaaaaagagattctagctcatgcgcctttcttagattttgaaattgaatatgctcaaccaaaactaattgttgccttgggtaatacgggattagaacgtcttttggggtctggtcataagatttcagctgaacatggtcaagtaattaaaaatacaccaattttacgtttaaatgaaactaaagacggctatatttggtcaaaagaaagatacactattttcccagaatatcatcctgccgctgttttttataatcgcaagctaacagatgatattattaaagattgggataaaatcaagccgtatgtagaaaaggaaaaatctgaaaatgagtaatgaaacttttttgattccaattagacaaaataatgatttatcggatatcgctttaaatgaattacgcatggatctagatgagcatgctttacatcaacgttattacactgatattgcttatttagcaggaaatagtcgtaagtatagtctaaatagtgtacaaaccgttgcgagtcctttgataggtaagaaaattttatttttgggttcttccgttacttttggttttggcgctttgggtgaaagctttgttgattatctttggaagcgtgatggcgttgctgcaattaaagatgcagaaaatggtacgaccttagttgatgaagatacttataagacaaacgattcttatgttgctcgttttagagaagagttgaccgaatcacaacctgatgtttttgtcttacaactttcaactaatgatgcaaatcaaaataaaaaactaggcaaaattactaatcaaaactttgataccaaaaccattacgggagctttggaatatatgatttcaacggctcaagcaaggtggaaatgtccaattttaatttatactaatccttattttgctaatccgttatacaaacagatggttgaacgagtacacgaactggctcaaaagtgtcagctacgacaagtttaaaaattgatatgtaaatatgttacttttatattataaagtatgatataatttcatcacaaggtggtgagattttttgtctagaattatgtatttaaaagaagctgctgcttatcttggtaaagctccattcactcttcaaagttgggaccgggctggtaaattaaaagcacatagaactgctaacaaccggcgcttttactatcaatcagaacttgatcaatatttaggtcttgatcataatgaacctattgataaacgtaaaattatagcttatgcgagggtttcttctaatgggcaaaaggatgatttaaaagatcaagtcgcttttttaaggcaatttttgaatgctagaggcattattgccgatgggtatatttcagatattggttcagggcttaactataagcgtccaaaatggcttaaattgattaaagacattgataaaaaccaaataaaagaaatttatgttacctatgaagaccgcttcatccgctttggctttgatttctttgaaaagttttgctcttggcatgactgtaaaataattgtcttaaataatgaagatacttcacctgataaagaattagtccaagacttaatcagtgtgattcatgtattctcttgcagactatatggcttaagaagatataaaaataaaatcaaaaatgatcctaacttaaaagaataggcctaagttaaaaatcctaaaggaggtgaaaatgatgactaattattaccttaagacacgtgtgtatgagttatttccaagtaaaacaatgaaagcagtgcttgaccgcaactgtgattatcgcagatattgttggaatcaagctttagctttatggaatgatctatattttgctcatcaaatctacgataagattcgttatactacttttacgcctaaagaaaataaaaaaacacaccaaatcaaaattattaaaaaagatgttcacttaaatccaagtccaagctggcgcttggtacgtgataagttagttgaagataaggaagattggcagttcaactattcggctcatttgcttcaattagcagtccaagatttaggcaaagcatggaataacttttttgataaggctcaacctgattggggcaagccgaggtttaaatctaaacgtgaagtaagacagggctttaaaagcgatcaagctaaggtgattaatggagagctagtcttggaaaagcccaaaggcttaaagcaagaatgggaagcaattggcttatctgaaaaaccgttagattatccaactggtgtcatgagtatttatcgtgaaagtggacgctattttgtgtctattccatataagatacctaaaaatgaatttaaagctaaagcaagtacaggtagagttactggtgttgaccttaatgtgggacactttaactacatagctgatgatgaacgaatcttacctcaaaagcttgaatatacttatgagaagattaagcactaccaaagattattagctagaaaacgtaaagtaaacggacgaaaagaaagcactaaaagtaataattacttgaagacgagaaccaagcttcaagtagcttacaagcgtgctactaacattcaaaacgatttactgcaaaagttcactgcaaagctaactaatgattatgacgccatagttgttgagaatttagatgttaaaaagatgatgatgagccatgtagcttcaaagggtatgcacaggtcaatgtttggcaagtttagacaaatcatagcttataagtgcaaatggtacggcagagagctaattatagccaatagtttgtatccatctactcaaagatgtgctgtttgtggaactgttaaaaaaggtgaagataaaatcactttaaaaggcaacaagaagcatggtactaagcataatgagtttatctgttacaattcaaaatgccctaactataaccaaaaagttgaccgtgacgaaaatgccatgctcaacttaacaatgctagttgagcatccagaattaaataaagcattataaaagaaattgcgggcgaggctacgtccgataaagaagccaaaagagtcagtcaatgcgattactcctaaattggaatatcggaaaactgatgaagacgttggtaagaaaaatgcaaggcactatagaccataatgtatgtaaatcaaacacactgcatacattagcatacatttttcatagcacgttgagattctagatttatacgatcatcctgattttcagcatcaagacgctttgtatatggctgatgaaattcatccaactcgtgcgggttatctaaagaaatggttaccattatttgaagaaaaaataactgaaattttggcataaagaaagacctagataaattatctaggtcaaaattgaaattagtcaatgttattacgatacaagctaactaccttacccaaaattgtaactttaggtaaaatgattggagccattgtatcattttctggctgtaatcggtagtgatccttttctttgtagaaacgcttaactgtagcttcattttcttcagtcattgccaccacgatttcaccattgttggcagatgattgtttgcgtacgattacgctatcaccgtttaaaatgccagcgttaatcatactttcaccgtggactttgagcataaagagttcaccagcatcactttttaagtctggtgggagtggaaagtagtcatcaatatcttcaactgccagaattggttgtcctgcagtaaccacaccgataactggaatttcctttggcttgatacctaactcttttttaccttcacgggtaatttccaaagcacgaggttttgtagcgtcttttactagccagccctttctttcaaggcgagctaaatgaccatggacagtggaagtagaagaaagaccaactgcagaacagatttctctaactgtaggtggaatgctccgtttctcaactgtatcgtaaatatattgcaaaatttctagttgctttttatcgcttgtttttcttggcatttttaattctccgtttgtatttatggtacttaatattataacctaattctaccagataatgtcaatattatcaaacaggcgttcttaagaagttatactttttttatgacataaaatagggtagactaatgagtgttaatgtgaggtggaattattatggataataaagatgcaatgagcaaagaagaagaaaaaaaggtaactgatcgaatcaacgaactttaccataagaaagaaaaggaaggcttaactccagaggaagaagctgaaagaaaagaactacataagaaatttttagctaactttagagctgcctttaagcaagatgttgaaaacatggtcatcttagacaagaatggcaaggaagttacctcagaacgtgccaagcgagcacaaagaagaaaaggacttagaaaagattaattagttctttcaaaaagttagagaactatgataagatataaatgttagttagatggaggatttaatatgaatttaggtttagcaatttttttaattatcattgcgctcttgattggcgctgtagcaggtttttacggtgcaagagcttacatgaagaagtactttaaggaaaatcctcctattagtgaagatatgatcgttgctatgatgtcccaaatgggtcaaaagccttcaaataagaaggtacatcaagtaatgaacatgatgaagcaccaacaaaagtaattaatttaattagttttgttagaaaaggcgaaggatttccttcgtcttttttgtgcacttttaagaatgaggtgaaatatgggaatatttagtaagttagggtggttttttaaggctgagaaaaaacgttatatcataggcattacctttttggcgttaacttctttagctaacttggtaccgccccgtgtattaggcttaatggccgatcaattggatcaaggtcacatctcttggggacaatatggaatgttgatcattgctgtcgtggccgctgcattcacactttatattttgcgctatttttggcgtaaacaaatttggggcggcgcagcagaattagagcgccaaatgcgttcaaagttatttgatcattttatggtgatggatcggactttttatcagcgtcatcgaaccggagatttaatggctcatgctactaatgacgtttctgccattcagaacgttgctggtgatggcgttttaacattggttgattctttagttatgggactttcaacaatgattgccatgatcatttttgttgattggcgtttaactattgtagctttattaccattaccgtttttggcattgggagcttggaaattaggtgatcacttacatgatgcttttgataagtcacaggctgcattctctaagctgaataataaaactcaggaatctgtatctgggattaaggtgctcaaaacttttggtcaagggaaagaagatactgctgcttttgacaagatggtcgatgaaacgatcaatattaataaaaaagtttttgtctgggattccttatttgatccactgggaacaataattatcggtactacgtatgtgatcacgattatttatgggggactattagtaactaacaagattttatcaattggccagttggtttcttttatcgcgtatatttctaacatggtttggccaatgtttgctattggttatttgtttaatattctagagcgtggtagtgcaagttatgaccgtgtagaaaagttacttgatgaaaggcctttgattactgatgcacatgcagatccaaatattacttctcaagatttgcaaggtgaattaaaatatgacattaaatcatttgcatatccagatgagccagatattccagttttaaagcaagtcaatttcactttaaaacctgggcaaactttagggttagttggtcgagttggtgcgggtaaaaccacaattattcaactgcttttgcgagaatttgatcagtatgatggtcaaattactctgaatggaaaagatattagaaatattcaactaaaggtattactcagtcagatctcctacgttcctcaaaataatttcttgttttcaactagtatcggcaaaaatattgctttctcttctgaaaatgtagataaggatgatattgcagctgcagccaagaagagtgatttgcatgatgatgttttgcaaatgcctaaaggctatgaaactttagttggcgaaaatggcttatctctttctggtggtcaaagacagagaatgtcaattgctcgggcattgctaaaagatagtcagattttgattttggatgatgcattgtcagcagttgacgcaaagaccgaaactgagattttgtcatcattaagaaaagagagagctgataaaactacaatgatcgcggctcaccgtttgacttccgtgatggatgctgatttgattttggttctaaaggatggtcaaatcgttgaacgtggtaatcatcaacaactattagctgcagatggatggtatgcggaaatgtggcgtagacaggaattacaagcgaaagtaggtgaagatacagatgaataataacgaagaacagcatgaatctgtttggtctaaggcgataccatttaaagagcaagttgatatttttaagcgtttaatgggctttgttaagcaatttaaatttgaaatgattgttgctttagttggtgcatttattgttagtgtaattaatattcttttgccacgtggcttgcaatatttcttagatcactttctattgcatcaaagcacaacagtgcaggtgattttgtttgcaggttttctttatgctttaggctcaattttaaaggcaataattcagtttacttaccaatatttctttgctttaggatcagaaaaaacgctagagagtgtcagaagggcattgtaccgcaaactgcataagctagggatgcgctattttgatcaaactcctgcgggctcaattgtttctagagttactaatgatacgatgactttgagtaattttttgacggtgctatcaacttttgtgattggtgctttttcggtgattactgcgttagtagcgatgtttactactaatatagttgctgggtggttgattttactctttattccgattttattattagttgtttggctttattcgcaaaaaagctcacgtctttatcgtaattatcgtgagcgtcttagtcgaattaacgctaacttaaatgaatcaattgaaggagtatcggttatccaagaatttaatcaagaaaaacggatgactaataattttgaaggcgaaaatggtggtttaatgaatacacgcttcaacatgatccgagtaaattcattgttattatcgccattgacatcgctgctttattcgttagctttagccatttcattaatgtactttggttttccattacgtgaaacttttgttccagctggtgtagtctatgccttttcacaatacatttcgcaactttttaatcctatttcaactgtgatggatcaaatgacctttttccaagatgggattgttgcaggaaagcggatttttcggatttttgatgatacccaatatgaaccacagcaggatgctcaaaaaggattgacgattactaaaggaaaaattgagtttaaacatgtaagcttttcttatgatggcaagcatgaaattttacatgatatttctttcgtagttaatccaggtgaaactttaggaattgttggtcatactgggtcagggaagagctcgattattaacgtgatgatgcgtttttacgaattcggtcaaggtgaaatcttgattgatgacgttaatattcgtaaatatcctaaagaagaattaagaaaaaaacttggcttggtattgcaagaaccgtttatgttttatggagatatttcatctaacattcgtttgtataataatcaaattactgataatcagattaaagacgccgctaaggcagtccaagcggatcgctttattgaaagaatgccgggtaagtatcatgctaaagtgattgaaggcggagaagaatttagtcagggacaaagacagttagtttctttcgctcgaactttagtcacagatcctaagattttggttttagatgaggcaacagcaaatgttgataccgagactgaaactttgattcagcaaggactaaagcggctgagaaagggtcgaacgacattagctattgctcaccgtctttctacgattgccgatgcggatcaaattattgttttagacaagggacgcataattgaacggggtacgcatgatcaattgcttgcacaaaagggttattactataatttgtataccttgcaaaataatgaaaataaaaactaattgtttttcaggacgtttgtgtagtagcaacgtctttttttgatataatagttaaaaagtattaaataattatgaatatttataaggagcaaaaatgaaaagatattttacagttcgtggtggagctggcgacgtttctaagccagacttaaatgctaagccacaagataacttatacttggctgttaactcagaatggctatctaaagcagaaattcctgctgataagacatctgctggtgtcaattcagagcttgaccaaaaaatcgaagatcgagtaatgaaagactttgcggacattgcggcgggcaaagaaaagatgcctgagattaaagactttgataaggcagttattttgtataagattgcaaaagattttgctaagagggatgcagaaaaagctaatcctattcaaaaggatttacaaaaattaatatccttaaataattttaatgattttaaacaaaaagctgccgatttgtttatgggaccatatgctttaccgtttgtatttgacgtcgatgccgatatgaagaacactgatgtaaacgtactccattttggtggcccaagcacattcttaccagatactacgacgtatcaaactgctgatgctaagcaacttttggatactcttcaagaccaaagtattaacttactgacaatgtccggtattggtaaaagcgaagcacgagtttatgttgaaagcgctttggcctttgatcaaaaattagctaaggtagttaagtcaactgaggaatggtcagattatgccgcaatttataatccagtaacatatgctgactttattaaaaaatttaaatcatttgacatggctgatttcatggattctattttaccggttaagccagatcgaattatcgttatggaaccacgttttctcaatcatgctgaagaattattgaatgaagggaattttgctgagattaaaggatggatgctagttaaatacattaacagcgtagctaaattattgtcacaagattttcgtgaagctgcgtttccttttggtcaagcagttactggtacgccacaattgccatcacaaattaagcaagcttatcgtttggctaatggtgcttttgatgaagtagttggtatcttttatggacaaaaatattttggggcaaaagccaaaaaagatgttgaagacatgatccaacggatgcttaaggtatatgaagaaagaattaatgctaataaatggctttctgctgaaaccaaaaagaaagctgtgattaagttaaaggcgttggttttaaaaattggttacccagacaagatcgaagaaatctttgacttattacaagttgatccgaaaaagagcttgtatgaaaatgaagcggcaatgtcaactgtacgaacgaaatatatgcttaataagttaactaagccagttgaccgttcagtttggctaatgccaggtaatttgaataatgcgtgctatgatccgcaaagaaatgacttaacctttccagctggaattttacaggcaccattttatgacattaatcaatctcgtggtgcaaattatggtggaattggtgcaactattgggcatgaagtatcacatgcatttgataatagtggagcaaaattcgacgaacatggaaatatgaacaattggtggactgacaaagattttgctgagtttaataaacgagttggtcaaatggttgatatttttgatggcttacaatatggtcctgctaagattaatggtaagcaggttgttggtgaaaatattgctgatctagctggccttgcttgtgtagttcaaactggggaaaatgatggggcggatttgaaagatttgtttgagaattatgctcgtagctggatgcagaaacaacgccctgaggcaattaagactgaagttcaaacggatgtccatgcgccacaaccaacgagagtaaacattccggttcaatgtcaaaatgcattctatgatgtatttaacgttaagccaactgatggcatgtggcttgatccagaagaacggattactatttggtaaaattgaataaaaaaatagtcactggatttcaatttctagtgactatttttgatatgtaattatttatcaagcatatatttacgagtcatcggtaaagttttacctgattgtccctttgtcaataggtattggataacgtcgatgttaccagactcgaaactagcagcacaagcattaaggtacatatcccacattctacagaatctttcaccaaatttcttttctacttcaggacgaacggcattaaagttcttatcccaaatttccaaggttctttgataatgacgacgaagagtttccatatcagtaatttgtaggcctgaatcgatgatgtcagtaacaatttctggtaagcctggtaagtagccaccagggaaaatatacttgtttaaccaagcattagtggcaccaccttgttgacgggtaataccatggattaatgcaacaccgtctttgttaaggtacttgtagacatcagcaaagtatttaggtaagttttctttaccaacatgttcaaacattcccactgaagtaatgtaataccatttttgatcaccaagttcacggtagtcttgtaatctaacttttgcgacatcttgtaagttatcgtcgtagattcgcttttgaactaatttaaattgctcctcacttaaggtaacaccggtgacttttaaaccgtattccttagctgcagtaagcatcagagttccccagccacatccgatatcaagtagggtcttgcctttttgtgggtggagtttgtttaagatatgatgtacttttgcaatttgagcttgttcaagatcatctttattgccatcttcgaagtgggcgcaggaataggtcattgttgggtcaagccacatcttgtagaaatcattaccaatgtcgtagtggctttgaatatcttcttcgctttgcttttccgtgtgtttttgcttaggcataaacttacggaacttagaagcacgcatgaatgaatcagcactttcataagcaccaacaagcaatttttggatattaccatgaatttcgatttttttatccatgaatccttcgcccaaagctagagaagcatttcgagtgatttcactcattggaatcttttcattaaaaacaatttcaatttcaggatcaccattgccataaacttcgctcttaccgtcccagtaggttaccttaacagaaaaggggaaagatttactaagcatcattttgtaaaaagttttttctaacaattgctttttcctccaatatttaaaacctaaaaattattttaacacttatattaaattgcacaggtaaagaaaaatcagtataaagcaatatttgctttatactgatttttacttatttagcaacgtagtggaaatttggatccatttccttatctaatttgttccaagcatcttcaagttgttgaaataaaatttgttcattttcatgggttagtttagttttacgatcaatggtaattggatcaccaaagttaacttctaatggcttgcgcttaagcagtcctttaaaagttaaagggccttggtagacaacaggtaccattggtttttttgacattttggaaattaataaaactccaccttttaattcagctgaatgtcgcgtgcctgaaggaaagataattaatgataactttccttctctaagtcccttaactggaatctttaaggctgatggtccagggttatttcgatcgactgggaaagcgtgagcatgatcaagaataaatcgtaaaaccggatttttgaataattcaattttagccataaacatgaattccattggactagcacctagtgcaaaaagcagtggttcccaccatgtacggtggggggctactaaaatataattgccctgaggcaagcgatccttatgatgaatgtgtagatgaccgtttaacacccaaacgatgaaacggacaatcggacgtataattttgtaaaacattgtctcctcattgattccttcatttgatgtaagctattataaaaatataatgacgagaaaggcaaatatttttatggtagatctgaaagataatgagcgaattgactacatgtatagcgataatcttcgtattattcaagataaaacggcttttagtttttcaatggatacattatttttagcatattgggctaaagacttgatccgtgataaagataaggttgctgatttatgtgcaggaaattgtgcagctacaatctatatggcttattttaatcgtgcccattatgatgcaattgaaattcaaaacgaagtttattctcaagcagttcgttcagtcaagcttaatgagatggaaaatcgtatttcagtttttcaggataatgtgctaaatgcaggacattttttgcggaaagatagttatgatgtagtaacagttaatccaccatattttaaagcacctaagggacatgaagttaatccagatcgtaaaaaagcaattgctcgccatgaacttttgattaatttagagcaaataattgaagtggctagtggcttacttaaaatgaaaggcaaaatgttaatggtacatcggccagagcgcttaggtgagattgcttattattgtatgaagcatgacttaagcatcaaaatggtgcagccatttgtgccacatcgcggtgaagatgctaatttaattattgtagaagccgtcaagcatactggaactgatggaactgttttgaaagatgctgttgaagttcatgaatcaaatggcgacttcactccattagtacagcgaatctcacgagaaactgcagatgacaaagctaaacatgaagcacagggtaaatattacttttatgtcttactgtgtaatgatggcagtttttatggtggttttactaatgatttagaacatcgtttgaaaatgcacaatttaggaaaaggagctaagtatactaaaacacggcgtcctgtacggatgatttatcatgaacagtttgacgataagcgtttagctttgaaacgagaatattggtttaaacatcattcacgtgcttggaaggaaaaatttttgcatgagcataatataaagttttaatccttgcatacctaagtgtataattttttacggtaagttgaataaataattaaaaaagcccaagtcctttgaatttggacttgagctcaaacaaaaagaccagtagtctgatgttaagaacaaaaaacacattagaagctggtcttttatgaattcaattgtaactgaaatcgcaaatattataaagtctgaagataattatattaagcgtgaaagaaaaataatctgtttcttcttaaacctgattaaggaaatcatggccttggctttagctaaagttgatgatgaaatgattaccaaggttaaagcacagggctatcagattgataagaagaatgagcgctcaatcaatatggcttttggcgaagttaggtatgtcagaagaagatatgtctgcccaggcaaacaagcaaggtatcccttggatgaattaatgggctttgacaaatacaagcgctacagtattttagcagtcaaaaacatcttagaagtaagcagcgttgccacttatcgcaatactgctctagcagtcaattgcctgtctggctttaatattagccatatgcaggtgggcaatttggtaaaaatggccgggaaaaatattaaagcgggccaagaagcagattcaagatatgatgccgcaggcactaagaaaaaggtcccagttttgtatcttgaaggcgatggcgtggtgatcaaaggcactaaaagccggttggaatttcatcgctatcaggtctgtgaaggcattgtcaatataagcaagaaacgcagaaagcgaatcaatgccaaggaatttgtttctttaagccgacttgatgcgctgaacgaagccaaggagtacctggccaatacttatgatctttctgatactgtaattcttagcaacgccgatggcggtgctggatatgccaaaacagacttcgatgacattgtagggctatgcaagcgtcatgagcatttcttggatgtctttcacctaaataagaaaatcaaagaaaggctatattttgcgcctgacctgcaaggcaagctgatttctgctttggaatacaaatacagctatgacaaagttaaaactatcctaaccactgcagaaagccgactaattgatgaattgaataccgagctcaatcatgattatctggggcgcctaaggaattatattgatcgtcattgggacgatattaagccgtttaagaaacgaaaactgactgtgactaaagccattggctgctgcgagagcaaccaccgcaagtatacctaccgtgttaaggggcaaggcaagaaatggtcaaaatctggagcagaaggcatgcttaggatcttaagctgcatcaagaatcgagagctggaattttggcttagcagcgagtttgaagattcagaaataactgtattgactgaacaggaattaaaagcagcggcccgtgacagcttaaagaagcgtcatgaagttcatttaggcatccagcatggcgcattaaccgcacaggtagctggcaatagttatttaagcaagctaagcagaaatttaagtcatataaatatttaagaaattaaggttagactaatggtttaaaggctaccgcaaaaacattgacacttaccttgcatactgtaatcttttcttgtagaatatttgagtatgctgtgtcagcatatgaaacttaaaacacatcaagagcaatcatcatcgtggtgcccagggtagtggttagatgatgaaatgaacgcttgagaggatataaaaccataggaggaatttaaatatggcagacgttgttacaatgaagcaattgcttgaagctggtgtccactttggtcaccaaactagaagatggaacccaaagatggctccttacattttcactcaaagaaatggtatctacatcattgatttgcaaaagactatcaagatgttagatgatgcttacaactttatgaaggctgttgcccaagacggtggcgttttcttatttgtaggtactaagaagcaagctcaagattcaattgctgaagaagcaactcgtgcaggtcaatactacgtaaaccaacgttggttgggtggtactttgactaactggtcaactatgcaaagccgtattaagagattaaagcaattaaagcaaatgtcagaagatggtacttttgatgttcttccaaagaaggaagttgctctcttaactaaggaaatggacaagcttgaaaaattctttggtggtattgaagatatgccaagaattccagatgtattgttcgtagtagaccctaagaaagaaaagattgctgttcacgaagctaacattttgggtatcccagttgtagctatggttgataccaacactgatccagacccaatcgacgtagttattccatcaaacgatgacgctattcgtgctattcgtttgattgccggtgctatggctgatgctgttgttgaaggtcaacaaggtcaagatgatgaatcagttgaagttgacttcaaggaaaatgcagacggttcagaagaaatcgttagcgctgaagaaaacccagaagactagattttactattagttccgtaggaggatctattaatggcacaaattactgcaaaattagttaaagaattacgtgaacgtactggtgctggcgttatggacgctaagaaggcattagtagaagttgacggtgacatggataaggctgttcaataccttcgtgataaaggtatggctaaggcagctaagaaggctgaccgtgttgcagctgaaggtttaactggcgtttacgttaatggtaatgtggcagctattactgaagttaactcagaaactgactttgtttctcaaaacgacaagtttgttaacttggtaaatgaagctactaagactattgctgaaggtaagccagctgatatggaagcagctaaggaattgaagatggctgatggtactactttagaccaatcattcgttaacgcaactgctacaattggtgaaaagattgttttacgtcgttttgctttagaagaaaagaatgacgaccaagaatttggtgcttaccaacacaatggtggccaaattggtgttatcactgttttagaaggtgcagatgctgcaactgctaagcacttggctatgcacatcgctgctatgagccctaaggttatttcaccagacgaattagatgatcaatttatcactgatcaattagctgtgatgaaccacaagattgaccaagacaatgaaagtcgtgcattggtacataagaaaccattacctcaccttgtttacggttcagctaagcaattaactgatgatgttttggctaaggctaaggaagacatcaaggctgaacttaaagaagaaggtaagccagaaaagatttgggacagaattattcctggtaagatgcaacgctttattgatgataatactcaagttgacaagcaatttgcagtgttatcacaagactacattatggacgatagcaagactgttggcgaatttttgaaggaaaaaggcgctaagttagttgctttccaacgttacgaagttggcgaaggtatcgaaaagaagcaagaagacttcgctgctgaagttcgtgaacaaatgaagtagtcattattacataattatcatagaaaggaggagtacaccgtgtgctccttctttttttgtaaaaattttgtagtgttttaagtgttaaaagacattgcggcattagatatggtagaataattaaagctattagaggaggtcattatgagtcaagttaaatataaacgtgtcattttaaaaatatcaggtgaagctttagcaggtgacaagggtacggggattaatcctactgtaattggtcacttagctaaagaaatcaaatcagttcatgatttaggtgttgaaattggtatcgtctgtggtggcggtaacatgtggcgtggtgaaactggcgctaagttgggtatggaacgtgctcaagcagattacatgggtatgttagcaactatcatgaatggtttagctttgcaagatggtcttgaaaaaataggtgttcctactagaatgcaaacttcaattgaaatgagacagattgcggagccttacattagaagaagagctttgcgtcaccttgaaaagggtcgtgtagtcatttttggtggtggtactggtaatccatacttctcaactgatactactgcagcccttcgtgcagctgaaattggtgctgatgtaattttgatggctaaaaacggtgttgacggtgtttactcagctgatccaaagactgatccttcagcaactaagttctcagaattaactcaacttgatttaatttcaaaagacttgaaggtcatggatagaactgcaagttcactttcaatggatactgaaattccattaattgtctttaacgttaatactccaggcaatatcaagaaggttgtattgggtgaaaatattggtactgttattagaggtgataaataatgaataacgaaactattgaaaaagcaaaaactaaaatgacggattctattaaggtttatcaaaagagattagcttctatccgtgcaggtgttgctaacgctgctcttcttgataatgtccaagtagaatactatggggcaccaactccattgactcaaatgtctagtattaccattcctgaaccacgtgtattgcttattactccatatgatcaaaattcattagatgatattgaacatgcattgttggcttcaaacttaggattaactccggcaaatgatggtaaggtaattagattagtaatccctcaactcactggtgaaagaagagaagaaattgccaaagaagttggaaaatttgcggaagaagctaaaattgctgtgagaaatgttcgccgtgatgccatgaatactttgaaaaaagatgaaaagaatggtgatattactgaagacgaacaacgtaacttagaaaagcaagtacaaaaagtaactgatgatgctgctaagcagattgaccaacttgctgatgaaaagcgtaaggaaattactcaaggttaaagatgagtaataaggataatgaattaaatcatttagccattattatggatggtaatggacgttgggcaaaaaagaggcatagacctcgttttgttggccatcgagagggaatggataatgttgagcggattactttagctgctgataaattaggaattaaagttttgacactttatgctttttctactgagaattgggctcgtcctaaagaagaagtagcttacttaatgaacctccctgttcgcttttttgataaatacatgccaacattgatggaaaataatgttaaggtaaatatcatgggctatttggatgaattgcctgaaaagacttatcgcattgttcaacgtgcaatgtcagagacggccaataatacaggcttaattctgaattttgcttttaactacgggtcaagaagagaaattacgtctgctatgcaggagctcggtggaatgattgaagctggttcactaaaaagcgaagaaattactgaaaaaatgatttcagaccatttgatgactaaaaactttggtccatatcaagatccggatttattaattagaacgtccggtgaacagcgaatttctaatttcttattatggcaattagcatattcagaacttgcctttagcgaaaaaaattggccagattttgatgaaaatgatttaaaaaaatttgtagaagattataagcaccgtaaccggcgcttgggtaaagtagacgaatcggatagttaaatatgaaacaacgtacaattacggcaattattgccttatgtctttttattccaattgtgctcgcaggtggcctttggatggattggctgactgtattattcgcagcagttggcattagcgaaatctttttaatgaagaaacaaatcttagtttcttttaattttttgttagccttacttgcaactttaacctggacagttccagactcattctttaaagtatttccttcaaatatcactaaattaggtgtgttttatggaattattatgttgttcttgacctggactgttctttcaaagaataaaaccacttttgatgatgtaggtgtatatattttggctgcactttacattggaataggttttcactatatggcagccattagagcatacccacaaaacggtttagcattgctgggttgtgtttttgttgttgtttggtccactgatatcggtgcctacatgattggacgtaagattggaaaacataaattatggccagttattagtcctaataaaacatgggagggctcgatcggtgcagttgtttgtgccttaatttgtagtgccatctatatggcaattcttggcagctttggtattaactttggtgtatctgaattaacgatgattattctggcctttttcttatcaattgttggtcaaatgggtgatttagttgaatcagcttacaagcgtttctatggtgtgaaagattccggaaagattttgccgggtcatggtggtatcctggatcgctttgatagtatgctgtttgtattgccagtagtggctacaattttaggtattgttcattaggagaattttttattgaagggtatactaatctttatcgtcgtctttggtatattggtatttgtccatgaatttgggcattttatcgtagccaaaaagtcaggtattttggttagagaattctcaattggaatgggtccaaagctttttcaaattagacgtaaccccaccacttataccattcgttggttaccacttggtgggtatgttcgtttagcaggcgctgacgatgaaagcaagctggatcctggtatgacggttgttttacaattgaatgaacaaaatgaagtagtgagaattgatgcttcagaaagcgaaataccaattgaaggaattcccgttcaagtaacaaaggctgatctagtagacgatttaataattaagggttacgaaaatggcgatgaaaatgatccagtaacttatcacgtagctcatgatgcaactattattgaaaaaaccggaactgaattaattattgcgcctcgagatacacaatttaatcaagctaatgtttggcaaaagttggcaactaattttgctggaccttttatgaacattcttcttgggtttgtagtatttttaatctggacatttacagttccaggtccagcaacaactacagttggatcaactcaggctaattcaccagcgcgtgatgcaaaaattgtgactggtgatcagattgtggcaattaatggacaaaagattaataattttgatcaagtgtcacagcagattaatcaaagtaaaggcaaggtcttacactttgaattaaagaaaaatggtcaaattaggaaagttacagttaagccaaaagctcataaaattcaaaaacaaacagtttatcaaattggtattgtagctaagagcaatgagaatgcagttgttaaattaaaacgtggctgggatacagctatttcaactaccggtctgattttcagagccgtaggtaacttatttagccactttagtttgaataaattatcaggtccagttggaatttattctcaaacttcacaagtttcacaaatgggctttacttatgtattagcctttttaggaatgatttcgattaatttgggaattgtcaatttaattccaattcctgggcttgatggtggtaaacttttattgaacttaattgaattagttcgcggtaaaccgatttctgaagaacatgaggcaattgttgaattaattggtttcggcttattattagttttaattattgcagttacaggtaacgatatctatcgctattttattaaataattatattttttactttaggagataagaatgcgtcaatcaaaattttttatgccaactttgaaggaagcaccatcagatgcagtggctgaaagtcataagctgatgattagaggtgggtatattcgtcaagtcacagctggagtttatgcttatcttccattaggctaccgtgttttacgcaaggctgagggaatcattgaacaagaaatggataaaattaatgttccagaaatgattatgcctcatttacttcctgcaactttgtggcaagaaagtggccgttacaagaaatatggtgcagaaatgttcaagttaaaagatcgtcatggacgtgaaagcttgcttggacctacacatgaagaaacttttaccgaaattattgctaagaacttaaagagttacaaacaaatgccacttgctttgtatcaaattcagactaagtttcgtgatgagaatagacctcgttttggccttcttcgtgggcgtgaatttgtaatgcttgatggttacagttttgctgcaactcgtgatcaattggatgaacaatttgatgatcaaaaaaatgcatataagcgtatctttaaacgtgccggtgttactgttcaccctgtaattgctgactcaggtacaatgggaggtaaaaactctactgaatttcaagcccatgctgctatcggtgaggatacaattgctactaatgaaaaaggaacatatgctgccaaccttgaaatggctaagagtattgatactttcaagcaagaaccagaagatgctaagcaattaactaaggtagctacgccaggctgcgatacaattgaaaaattagctaaattcctcgatgtaccagctactagaattgttaaaagtattttatacattgctgatgaccaaaaagttttagtattaatccgtggtgacaagcaaatcaatgaggttaagttgggtcatatccttgacgctgatgaggttcatgaagcaaatactgctgatttaaaggaaatcactggtagtgaaaagggtggcgttggtcctgttaatgcagattgggctgataagattattgcagatgaaactgttaagaatctttacaacgttgtagttggtgcaggtgaaaccgattatcaatttgaaaatgctaacttagaccgtgatttcaaggtggatgaatttgctgatattcggactgctaacgaaggtgaaccagatcctgttgatcatttaccgcttaagttcactacttcaattgaagttggtcacattttcaagttgggtacttattacactaagaccatgggtgcagatttcttagatcaaaatggtaaagcaaagcctgtcatcatgggttcatacggtattggcgttactagaatgttatcagcagctgttgaacaacacttaactgaacgtggtgttgcatggccaaaggaaatcgctccatttgcaatacatattgttcaaatgaagatgaataaagaagatcaaactgaattagctgaaaaacttgaaaagaaattcagtgaaaagtatgatgttttatacgatgatcgtaaagagcgtgctggtgttaagtttgctgatgcagatttagtcggtgcaccaattagaattacgattggtaagaaggctgctgatggcattgttgaagttaagcgaccaactgatgacaaagcaaccgaaatgtcaattgatgaattagataagtttgtaaatcaagagttaggataatttttgtggcaaataaaaacgatcttttcttaaaattgctcaaacaggttcaatttcctgatagttttgaagacaatgcgcttctacaaaaagggaaaattgaaaacgtggatgtttacgctaaagaacacaggtgggatatccacgttttttttgatactcccttgatgtatgacacctatgtagcattaagaaaagctgtagaagaaactttttcttcttttgtaaatgtaagattttatgttggaacagctgatggttctgatcaatatttaccagattattggcattatgtagttcaaaattcaaatattttgcaacctgtggctcgtgaatttttggctggccaaaaacctaaaaaagttgatggccgctgggttattccagttgataataatgtgattgatggtttaattgagcagaaggctttagatgatttagctgaagagatgcgtgattatggcttctttaatttgaaatttataactcagctggatcagacaagttctaaaaacaatttagaaagtttgcaggagttgcaacaagagcatgaaaaaagcatgcaggaagtctttgagaagacgccagacaaacctaaaccgcaacaacctaaacagtatccaactagacgtactaattatggtaaacgtaaattagatgaaaatgctccaattacacaaattaaagagctggaagatggcgtacgtaatgtagtaattgagggaaatatttttaatgttgaaactcgtgagcttaaatctggtgcaatcattttttctggcgaaattacggattatagtgattcaattgcatttaagaaatttgtttctaataaagatgaaattgaagagctatctgcaattaaaccaggaacttgggctaaaatgcaggggtcagttgctgatgatcaatatatacatgatgtagtttttaatattagtagcttagagactgtcgagcatgttgggcgaactgaaaaatacgaaggtgagcctaaacgagttgaactacatgttcatactaatatgagtcaggttgacgcaactaatactccgacggactttattaaaactgctaagaagtttggacaaaaggcaattgcgattaccgatcatggtgatgttcaatcattccctgaagcatatagcagtggtaaagcactggacatgaaaatattgtatggtgtagaagctaatatgattgatgatcatgctttactagttttgaatcctgcaccgatgacctataaagaccgcgagtttgtaatttttgacgttgaaactacggggttgtcatctgtttacgacacaattatcgagattggtgcggttaagatgaagaacggagaagtgcttgaacgctttgataagttcattaatccgcaccatcctttaagtgagcaaactattaatttgacttcaattacagatgaaatggttggcgcagccgatgatgaagcagttgtcattaagcaattccaagacttttatggcgatcgaccactgtgtggacataacgttcaatttgatgttgggtttgttaatgcagcattaagacgtgcagggctaaaagaaattactcagccagtagttgatacacttgaagtatcgcgtttactacatccagagcagagtcgccatactttagattcattagctaagaagtataatgtttccttggaacaccatcaccgggcaaatcaggatgctgaagcaactggctatttaatgtttaaattgttagatgcttttaataaaaagtatcatgaaaataatttgaataatttgaatggctatgcagcacatggtgaagtttataaacgagcccgtccttcccatatgacagttttggcaaaggatcaagctggattaaagaatctttacaaattagtatcaattgccagcacgaaggactttttccgtattcctcgtacgccgaagtcagatttggctcgtttgcatgatggtttactttatggttctggttgttggcaaggcgatgtctttatagcaatgatgcaaaaaggttacgacgaagcaagagaaaaagctaaattttatgattatcttgaagttcaacctccagcaacctattcgcaattaattgctgatggtttgattaaggatgaagatcaattacatgaaattattgaaaatattattaaattagggaaggaattaaataagcctgtagttgcaactagcgatgcccactacgttgaccaaaaggacgctatttatcgtaaaatcttgattgcggctcagagatcaaaccctagtcgaaataagccgcagccagatttgcatttctattcaacacaggaaatgctagatgcattttcattcttaggtgaagatgtggctaaggaaattgttattgacaataccaataaaattgctgatgaattgtcagaaattcagccaattaaagatgggttatacccaccacatattgaacatgccgatgaagaaatgaagaagttgacctatgataaggcttatgaattatatggtaagccattaccgaagattgttaaggatcgaatagatttggaattaaattccattatttcgaatggttatgcggttatttacttgatttctcagcgtttagtagctaagtcaaataaagatggctatttggtaggttctcgtggttctgttggctctagtctagtagcaacgatgtcaggaattactgaagttaatccgttagctccacactatcgttgtcctaactgtaagtattcacaattctttgaaaatggggaatatggttctggttttgacttgcctgataaagattgtccaaaatgtggaactccattagttaaagatggacaagatatcccatttgcgactttcttaggatttcacggcgataaggttcctgatatcgatttgaacttctcaggtgactatcaaccagtagcccataattttattcgagtaatgtttggaccagataattcatatcgtgctggaacgattgcgactgttgcggataagactgcttacggttatgctaaacactacgatgaagagcatgatttaaagctaagaaatgcggaattagaccgtttggcagctggtgtccgtggtgtcaaaagaactactggtcaacaccctgcaggaattgttgtagtgcccgatgatatggacatttacgattttacgccggtatcgtatccagccgatgatgtaaatgccgcttggttgattactcactatgacttccactctattcatgataatattttgaagtttgatattctgggacatgatgatccaactatgattcgtcacttgcaggatttgtctgggattgatccattgactattccacccgatgaccctggagtcatgtcattattttctagtcctgatattttaggtgttactccagagcagattcaatcagaaactggaactttgggtgttccagaatttggtacccgttttgttagaggaatgcttgaggagactaagccaacgacattttctgaattattacagatttcaggtttgtcccatgggactgatgtatggctaggaaatgctgaggacttaatcaatcaaggaatttgcaaactgaaaaatgtaattggttgtcgtgacaacatcatgatggacttaattcactggggcgttaagccagaagttgccttttcaacaatggaatccgttcgtcatggtcgtggcatcagcgatgaaaatatggctattttaaagaaaaataagaatattccagattggtatattccttcttgtctgaagatcaagtacatgttccctaaggctcacgctacggcttacattttaatggctctacgaattgcttggtttaaagtatattatcctgaaatctattacacagcttacttttcagttcgtgccgatctatttgatttggttgcaatgagtcatggtaagaatactgttaaggctgcaatgaaggaaattcaggataaaggaaacgatgcatcagctaaggataagagtttgatgaccgtgctagaaatagctaatgaatgtctagaacgagggattaagatcaaaatggttgatattgatcaatctgaagcaactgactttaagatcttagataagcatacaattttagcaccgttcaatgctgttcctggtttgggggataatgcagctaagcagattgtagctgctcgtgcagaaaagaagtttttgtctaaagaagatttagctaagcgcggtaaagtatcacaaacaattatgaattatttcgaagaaaatggtgtcttggaagggatgccagatgaaaatcaattatcacttttctgatagttaaattttacaagatcaggtaaaacatggtatactacgtatgaagttcgaataggtaaattcgagtgagcagtgatgctcactctttttattacggaggaaaatttttgtctaaagttatagattctgttcgtccagttgtcgaaacaattattgatgaacatggtgacatgttggttgatatggaatacgttaaagaaaaagggcaaaattatttacgcatttatgttgatcgccaaccaaacggtattgacattgatgagattgcagctttaagtgaacttgtttccgaaaagctggatgctcttgatcccgatccacttccagatccctatgttttggaattatcatctccaggggcagaacgaccaatcaaaacaaaagctgattgggaaaaagctctgaatgattacattcatgtcggtctttatcaaaagattgagaataaaaaaatgtatgaaggtacactcaagtcttataatgatgacgaagttgtattagaaataaaagataagacaagacgaaaaacattaactgttccccgtaagttaattgcaaatattcgttttgcaattgaattttagaaaggttgatcaaaaacttatgtctaaagaaatgctagaagcgtttgctactttggaaaataccaagggcattaagcaagatgttattgttgatgcaattaaagccgctttggtagctgcatacaaaaagaattataatcaagcacaaaacgttgaagttgattttgatgaaagaaaaggtaacttcaaggtaatggcagttaaaactgttgttgacgaagtgcaagatgaccgtcttgaagttagtttaaaggatgctttaacaattaatcgtgcttatgaagtaggcgacgaaattcgttttgaagtaacacctaaaaattttggtagaattgccgcccaaactgctaagcaagttatcatgcaacgtctacgtgaagccgaaagaaaacatattattgatgaatattcacaatatgaagatgaattggttactggtaccgtggaaagacgcgacaatcgtttcgtttatgtaaagattggtaatgttgaagctgttatgcctcaccgtgatcaaatgccaaatgaggtttacaatccccaagaccagattcgtgtactagtaactcatgttggctccgatagcaagggtgcacaaattacagtctcaagaactgctcctgacatggttaaacgattgtttgaacaagaagttccagaaatttatgatggaaccgttgaaattgtttcaatcgcacgtgaagcaggtgacagaactaagatggctgttaagtcaaatgatcctaacatcgatccggtaggtacctgtgtaggccaaaagggtgctcgtgtacaaaatgtagttaacgaacttggcggtgaaaatattgatatcgttaagtatgaagaagatccatctgactttattgctaatgcattaaatccagcagaagtgattgcggttcaatttggtgatgatgaagaagaaaaaagtgctttagttatcgtaccagattaccagttatcacttgcaattggtaagaaaggtcagaacgttcgcttagctgctcgtttgacaagctataagattgatattcgtcctgaatctgaagtagaatttgtagatgaaaaaacaaatgatacagctgatgctgcagatagtagcgaaacttctgaaaatgttgaaagtacagatgacgctgctgacgttgaaagctcagatgatacaactactgtagaagattcaagtaaagaagataaaactgaagaataggtgattttttgaaaaaaagaaaaatcccaatgcggaaggatttattaaccgatacaatgcagcccaagaaggaattagtacgtattgttatcgataaagaaaaaaatgtgtcagttgatccaacaggtaaaaaggctggtcgcggcgcatatgtttcccttgatccaagtaagattgaagctgctaaagagaagaatgtattagaacgtagtttaggtgcgaaagttccagatactttttacgatgagctttactcttatgttgatcatcaaaaggcaagaaaagaattatttggtgataaataagattgcaaaatagacaaaaagcaattaatttgttaggtttagctgagcgtgctggtaagttaactaccggtacagagacagtcattaatgaacttaataagcacaaaatcaaagcggttattatggctagtgatgttcaagacaacacggcagaaaaagtaaaccgcgctgccagaaaagacaatattcctatgataactatgtttactgccattgaattgtcaaaggcaattggcaaaaaacgcaaagttttaggattaactgatgctggttttgctaaggcgttagtaaaaaaaataaatgaaggagtgtgattggatggcaaagaaaagaatttatgaaatcgcaaaagaagtcggcgttgataacaaagttgtagtccaaaaagcaaaggatttaggcttagatgtaaagaatcacatgtcatcagtagatgattcacaggttgcaaagttaaagaatagtttccaaaactccgctcctgctgcaaaatcttctaataaaaagaataaaataaaaatctctgtttcttctattcgcaaaaatgaaaagaagcaagaagataataatagttctaagaattctaagagacgcaataataaacgtcgttcaaataatcacggtcatgagaataaaaatgatcgtagaaataatacaggtaagccaaaggcagctgctttgttacaacaatttaaacaaaagcaacgggcagaagaagggcaacttaatcgtgaagcccaaaaagccagaaaagaatatcatgagcaattaagacatccaaaacaagaacagccagtgaaagataataagaaaacaagcaaccacaaagataacaagaagaaagcagaaccagtagaaaagaaagttattggtcctaagattttaaagccttctccagctcgtttgaagaagcaacagcctgaagcgactaaagaactagttcaagttactattcctgaggctcctaaggaagaaaaacgcggcaataatcgtggtcgcaacatgggaaagccaggacgcaagggtaaaaatcaatttggcaatggtcgtagtgaccattcagatcgttcagagagaaagcggcgtaagaataaaaaacgtcaacaagagcaaaagccaaagaaaacacttactaagcgtaaggaacgtccattaccagaaacattagtttacgaagaaggtatgaacgctcaagatattggtaagttaattcaccgtgaaccagctgaaattgttaagaaactcttcatgcttggcgtgatgactaaccaaaaccaatctttggataaagatacaattgaacttttagctgctgaatatggtatcaatgctgagcaaaaagttcatgaagacatctctgatattgataatatctatgacaagagaatggaagagtcaaaggaatctaaaaaacaggttaaacgcccaccagttgttacaatcatgggacacgttgaccatggtaagaccactttacttgatcgtcttcgtcatactcatgtttcagctcatgaagctggtggtattactcaaaagattggtgcttaccaagttagattagatgatcgcttaattacattcttggatacaccaggacacgcagcattttctaacatgcgtgcacgtggtgctgaaattactgatattgttgtactggttgttgctgcagatgatggtgtaatgccacaaactgtagaagcaattgaccatgcaaagagtgctaatgttccaataattgtagcaattaacaagatggataagccaggtgcaaatccacaacacgtaactgaggaattaatgaaatacaatttgattcctgaagattacggtggtgatactatcttcgttaatatttcagctaagacaggtcaaaatgttgatgacttattacaaatgatcttgttgcaatctgatgtgatggaacttaaggctaatccaactgaaatggcaattggtactgtgattgaagctcgtttgtcacgtggtcgtggacctgtagcagacgttttaatccaacaaggtacacttaatgttggtgacccgattgttgttggtaacacttttggtcgtgttcgtactatgactaatgatcgtggacgtcaagttaagaaggctacaccatcagaacctgttgaaattactggtttgaacgatgtgcctgaatctgctgataagttagttgaatttaaggatgaaaagaccgctagaagtgttggtgaagctagagcacaacaagctttacaaaagtctcgtgaaaatgttcaacacgtaactcttgataacctcttcgatactatgaagaaggaaaacatgaaggaagttgacattgtcttgaaggctgatgttcaaggttctgtagaagctttacaacaatcgcttgaaaagattgaagttgaaggcgtacgtgtaaatatcattcactcaggtgtaggtgccattaatgaatcagatgtaactttggctggtgcatcaaatgcatttattattgggttcaacgttcgtccaactgctactgctaagagccaagctgaaaccgatggcgtagatattcgtctttacagcattatttacaaggctattgatgatgttactgctgccatgaagggtatgcttgaaccaacttatgaagaaaaggttatcggtaatcttactgttcgtgaaacttggaaggtttctaaggttggtacaattgctggttccttcgttgataagggcttggttaagaatgattctaagattagagttattcgtgatggtatcgttaagtatgatggtgaaattgcttcacttaagagatttaaagatgatgttaaggaagttaagcaaggtaacgattgtggtttaacgattaaggactacaacgacattaaagttggcgacgaattcgaagtttacgaaatgcaacaagttgagcctaagtaattactattaggaggaaaacatgaagcatagaattggtcgtgttgaaggtgaaattctacgcgaattaaccaagattttacaaaagaatattcgtgatccgcgcttaagtggtgtaactattaccgcagttgaatgtacgaatgatctttcatatgcaactgtttattacagcctgctaactgaagatgagcataaggaagaagaggttcaggcaggttttgaaaaggcaaaaggcatgatgcgtcatttgcttggtcaaacattaactgtttataaggttcctgaattaatttttaaacgtgataattcagttttgtatggtagtaagattgaccgtttgattgcagaagttaagaaacaagatgctaagcgggaaagcaaataaaaaagagggcgccgtgatggtgccctttttttgttgaaaagaatagggaataattatgttaaacggaattttagttattgataaagataaagggatgactagtgcagatgtagtttatcatttgcgccgcgtattacatattagaaaaataggacatgctggtacgcttgatcctgaggtgacaggcgttttaccaattgctattggtcaggctactaaattaattgaaatgatgcatactaggccaaaagaatatattggcacgggactatttggttatagcacagatagttatgatgcaactggaactgttttaaaagaaaaaaagttgattcagcctttttctggtgcagaaattcaagaaaatatgaataaatttgtaggagaaattgttcaagtgcctccaatttattctgctgttaaagtgaatggtaaacatctttatgaatatgcacgtgaagagattgaagtcgagcgacctcagagaaaggttgaagtcaaacaatatgatctaactaaagaaccagtttttgatataaatactgggcaagaaagctttgattttaagattaaatgcagcaaaggcacttatgttagatcgttagttaatgatctaggtgaaaaattagattgccccgcaacgatgacttatttgagaagaacagctagttctggctttgatattacacaagcagtaaaattaaaggagattgaagagaatccgaaaaaggccactgaacttatacagccgattgatgcattttttaaggaatacactcaggttgatttaactgaagaaaagtggcttaaagttaaaaatggagcgggtatttcgcttgaaactaatgcgaaaaaagttgcactacgatacaataaaaaggtgaaagcaatttatgaaaaaaaaggaaagctttatcgcccaagcttaatgctgttgcaaaatgaataaatgaaatgaaggaattagctgtgaaaatcgttcatttaacatatcctgttaaggaaaatattttatctactagaattgtgcttgcccttggcttttttgatggggttcatttgggacatcagcgcttaattaatcaggctaaagaaattgcattacagaagaaattgtcattagttgtgttgacctttgatcgacatcctaaggaagtttatgagtcgaaacgagattttaaatacttagaaactttggaagaaaaagctaacaaaatggcggaattaggagtagattatttggctgttttaccatttactaaaaatttcagtcaaatttctgcacaagaatttgtcgataatgtaattgtcagattaaatgctgataccgttgttgctggctttgattacacttatggttctaagaatattgcaaatatggctaatttaccccaattttccaaagggcgttttaatattgtagtgatgccaaagcaaacttttaacggtagaaaaattggctcaactgaaattcgtcaagcaattaaggatggtcagatgaaattagccactgaattaatggggcaccattatgtaatgagtggtatcattgggcatggtaaacgaaatggtcataagctaggctatccaacagctaatttgatttgggcagaacataaggtgattcctaaaattggagtttatgctaccaagactaaagtaaatggtaagtggtataactccatgactagcgttggctataatgtaaccattaatcaggacaagaagatatatattgaatctaatatttttgattttaatgaagatgtctatggtaagccaatgaagatcaaatggtataaatataccagaggtgagaaaaaatttgccggattacctgaactgaaagagcaacttgaacgagatgagcaagaaattagggcttattttaagcaaaagggttaagaagctacgtactttgaaaaaagtgcgtattttttgaataaaattagcaatctacttgatttagtgctaatttctggtatcatattaactgttagcacctgagagatgtgagtgctaaaagtgagggcgatataatatgttgaccgagcgtcaagagcttattttaaaaacaataattacagactttacacaaagtcatgagccagtaggctcaaagaccgtaatgaagcagttgccaattaaagtttcaagtgcaacgattagaaatgaaatggccgtgttggaagagcaggggttaattgaaaaaactcactcttcaagtggtcgaattccttcaagcgagggctatcgttattatcttgataatttagttgagccgttgcaattaccagagtctgtttataatacaataggaagccaattagatcgaccttttcatcaagtaaatgaaattgtacaagaagctgcacgaattctgtcagatttaactaactataccgcatttgcggaaggacctgagagtcatgatgttagagtcacaggatttagaattgtaccgctgtctcaacgacagattatggcaattttggttacaagtgatggtaacattcaaaatcaggtatatgctttgccacataatattcacggcgaagaaattgaaaaggctgtccgcatgattaatgatcagttagtcggaaagagcctaaatgaaatcaacgtttcgttgctaagtgaattagctaaaaacgaattaggcggcgaacatgtgactgaattgcttagtttagttgaagatgtcgtaaaagatgcagctagtgagcagatgtatgtggatggacagattaatttgctcaataatacttctgaacatgatgtaaatgacattcgttctttgtacgagttgattgatcataataatctgttcactaatttaatggatgcaaaggtggatccaaagtctggaaattatccagtaaaggttaagttgggatctgaattacccaatgatttattaaaaaattatagtttgctgacagctgagtacagcgttggctcccatggtaaaggaactattgctttacttgggccaacgaatatgccatattcacaaatgattgggttgcttgaatattttagaaatgaactagctaaaaagttgcttgattattatggcaagtttcaataaaggaggttagccgtgagtaaagaagaatttccaagtgaaaaaaatctagagcaaaaagaaaagacttctgagcctaaggctaaaaaagaagccgataaaggtgaagaaaagaagcaagaaaaaaataaacaagatcaaaaattagctaaagaattagctgatttaaaagataagaacaaggatcttgaagataagtatttgcgtagtgaagcagaaattcaaaatatgcaaaatcgctacactaaagaacgtgctcaattaattaagtacgaatctcaaagcttagcgaaggacattttgccagcaatggacaatttggaaagagccctaagcgttgaggccgatgatgatgtgtctaagcagttaaagaagggcgtgcaaatgaccttggatgcacttgtgaaggcaatgaaagatcacggtgtagttgagattgaggctgatggcgttaaatttgatccgacattacatcaagctgttcaaacagtagcagctgagaatgatgatcaaaaagatcacgttgttcaggttttacaaaaaggatatcaatataaggatagaacactaagaccagcaatggttgtagttgctcaataagagaggaagctaatatatgtcaaaagttattgggattgatcttgggactactaactcagcagttgcagttcttgaaggtaaagaaccaaagattatcactaatccagaaggtaaccggactactccttcagtagttgcatttaaagatggtgaagttcaagtcggtgaggtagcaaagcgtcaagctattaccaaccctaataccattgtttcaattaagcgtcacatgggtgaagctgattataaggttaaagttggtgataaggaatatacaccacaagaaatttcagcatttattttacaatatattaagaaattctcagaagattacttgggtgaagaagttaaggatgctgttattactgttcctgcttacttcaatgatgctcaacgccaagctactaaggacgctggtaagattgctggtttgaatgtgcaaagaattattaacgaaccaactgcttcagcattagccttcggtttaaataaagaccaagatgaaaaagtcttagtatacgaccttggtggtggtacttttgatgtttctgtattgcaattaggtgatggtgtcttccaagtattgtcaactaatggtgatactcatcttggtggtgatgactttgatcaccgtatcatggattggttaattaagaactttaaggatgaaaatggtgttgatttgtcgaaggacaagatggcaatgcaacgcttaaaggatgctgcagaaaaagcaaagaaggacttgtcaggtgtatcaagtactcacatctcacttccattcatttctgctagcgaagctggtccattacaccttgaagcagatttaactcgtgctaagtttgatgaattaactgctgacttggtagaaaagactaaggtaccatttgacaatgcattgaaggatgcaggtcttactgttaatgacattgacaaggttattttaaatggtggttctactcgtattccagctgttcaaaaggcagttaaggaatgggctggtaaggaacctgaccattcaattaaccctgatgaagctgtagctatgggtgcagcaattcaaggtggtgttatctcaggtgatgttaaggatattgttttacttgatgttaccccattgtcacttggtattgagaccatgggtggtgtcttcactaagttaatcgacagaaacactactattccaacttcaaagagtcaaatcttctcaactgcagcagataatcaaccagctgtagatgttcacgtattgcaaggtgaacgtccaatggctgcagacgacaagactcttggccgctttgagttaactgatattccaccagcaccacgtggtgttcctcaaattcaagttaccttcgatatcgataagaacggtattgtaaatgtatctgctaaggatatgggtactggcaaggaacaaaagattactattaagagttcatccggtttatcagatgaagaaattaaacgtatgcaaaaggatgctgaagaacacgctgatgaagataagaagcgtaaggaagaagcagaccttagaaacgaagtagatcaattaatctttactacagataagactttgaaagatactaaggataagctctctgatagcgatcgtaagccagttgaagatgctcttgaagctttgaagaaagcccaaaaggacaacaacttggatgaaatgaaagaaaagaaagatgctttatccaaggctgctcaagacttagctgttaagttgtatcaacaaaatggtggtgctgctggtcaagctggtccacaagcaggtcctcaaggcccacaaggtggtaattcaaataatggcaacaacggtaatgcccaagatggtgaattccacaaagtagatccaaataagtaatgggtttataattaaacaaaaggagaaaagaactacccattgagtagttcttttcttttgagaatacaaggagttcaaatagatggcacaagaagattactataaagtacttggcgtagatcgtgacgccagtgatcaggaaataagtagggcatatcgtaaattagccaaaaaatatcacccagatttaaaccatgaacctggagctgaagaaaagtataagcaggttaacgaagcctatgaggttttgcatgataagcaaaaacgtgcgcaatatgatcaatttggttctgctggtgtaaatggtcaaggtggctttggtggtggagctggtcaaggctttggcggtgccggatttgatacttctggctttggtgattttggcgatatctttggcgatatttttggtcaaggccgtcaacagagggttgatccaactgcaccacaacgtggccaagatttggattatcaattgacaattgattttatggatgccattaagggcaaaaagacccaggtcagctatactcgaagcgaaacttgtgaaacttgtggcggtaatggttgtgaaaaaggtacacatccaattacctgtgataaatgtcatggaactggttatatgacaattactcaacaatcaatgttgggcatgatccgtcgtcaaaccacttgtgacaaatgtcatggtcgtggtgtgattattgagcatccatgtaaaacctgtggcggtaaaggaacagttgaccgtaagaatactattgaagtggatattccagcgggaatcgacaatggtcaacaacttagatatcaaggccaaggcgaagcaggtataaatggcggaccatatggtgatttatatattaactatcgaattaaaccatctaaagattttgagcgtcgtggccagactatttatacagaagtaccaatctcatttgctcaggctactttaggagatgaaattaacgttaagactgtgcatggtgatgtaaagctaactattccagctggtacgcaacctaataagaagtttactttgcgtggacagggtgtgccatatcttcgtggtaatggcaatggtgatcaaattactacagttaatattgttattccaaagcacattaatgataagcaaaagaaagatttgaccaactttgttcatgatggtggtggcaatattacaccacaagaaaaaggattttttgaacgcttaaaagataagtttaatatgtaaatgctaaaaaggtttctgctacttgcaacagaaaccttttttaagatcaattaattttttggtgatttttagagtttttcttggaaaatattcaatgctgaattttcaattattattctaaaaactctgcattttattgaaaatttactatgctacaatttcatcatttattctagctttgctataattaatacatagtaaagggtgaacgattttatggatttaaaaaaattaaaagactatcaaaaacacattcgaaattttgctattgtggcgcatattgaccatggtaaatcgactattgctgacagaatcttagaattaactgatacagttagtcaacgtcagcttaaaaatcagatgttagatgatatgccacttgaacgtcaacgtggtattaccattaaaatgaactcagttgaagtgaaatatcatgctgaagacggtgaagactacattttccacttaatcgatacaccaggacacgttgacttttcatatgaggtatcacgttctctagctgcctgtgaaggtgctttaatggtggttgatgcttctcaaggtgtacaggctcaaactttggctaatacttatttggcaattgatgacgatttggcaatcttgccagtaattaacaagattgacttaccatctgccgatgttcctaagactaaggaagaaattgaagaaatgttaggtttggatgcttcagaagctgccgaagtttcaggtaaaaccggtcaaggtattaaggacatgctggaaaaggtagttaaagatattccagctccgtctggtgatattactgctccattaaaagcattgattttcgactctaaatatgatgattatcgcggagtggtaatgtctgtcaaaattgaagatggatctattaaaccaggcgatcgaattcaaattatgaatactggcaaggaatatgaagtcacagaggttggtgtttctagtcctcatccaattaagaaggatattttaatcgcaggggatgtaggatatattactgctaacattaagtccgttcgagaaacacgtgttggtgacacaattactcaagctgataacccaacggctgaaccacttccaggctatcgtcaaattccaccgatggtttattctgggatgtacccagttgacaaccgtgattatgaagatttgaaggaagctttacaaaaactacagctgaatgatgcagctttagaatttgagcctgaaacttcaacagctttaggctttgggtttcgttgtggcttcttaggcttacttcatatggatgttgtacaggaaagattagagcaagaatttgaccttgatctaatcatgacagcaccatctgttgattatcatgcaattatgaatgatggaacaaccaaggtgattgataatccatctgatttgccagatgctggtgaatataaggaagttcaagaaccttatgtaaaagcggaaattatggtgccaaatgattttgttggtccagtaatggagctttgtcaacgtaagcgtggtgaattcgttaccatggattacttggataagtaccgagttaatgtaatttacaacatgccattagctgaaattatttttgatttctttgatgatttgaaatcttcgactaaaggttatgcttcacttgattatgaaattacgggttatcgtgctactgatttggttaagatcgacattttgcttaacaaggagccaattgatgcattgagttttattgctcacagatcagaagctcaagatcgtgcccgtcaaatgacttcaatgctaaaaaaactaattccacggcaaaactttgaagttgatattcagggcgcaattggagctaaaattatttctcgagctacaattaagccataccgaaaagatgttacctggaaaatccatactggtgatccagatcgtcgggctaagctgcttgaaaaacagaaacgtggtaagaagcgaatgaaagcagttggtagagttgaagtacctcaagatgctttcatggcagtcttgaagatgaacgatgatgacatcaacggtaaataaaaatggctaaaaataaaaaaaatagtgtaagtacaattttacttagagttgctgctatcatattattgcttgttggtattgctttgatatttaacaaacagatcagtgatcaattaattcatcataatcaacaatctactttaagtggaataaatagaaagacaattgaagaaaacaaaaagaaaaaaggaatgtatgattttagtaaagttaagtctttaggcattgcacaagcagcaagatcacaagtgaaaaagacttctggtgcgattggtgcgttagctattcccgatgttaatatgtatttaccgattatgttggggatgagtgatgatgcaatgtcgactggtggcggcacgatgcgagccgaccaagtaatgggtaagggaaattatcctcttgcaggtcactacatgacagcaaaaggtattcttttctcaccacttgaagatgttaaaaaaggtgagttagtttatttaactaatcttaacaaagtatatgtctatcgaatttatatgaaaaagattgttgatccaactgcggtttggctagtcgataatactaagaagaatattgtaactttgattacttgtgctgatggcggtaagaatcgttgggcaattcggggtaatctgattaaaactgaaaaggctaacaacaataatcttaaggtttttaaattaaaataaaaatttacaatctttaatcagatttagatttgcgataaaattataaatagattttgtaataaagacactcaacaatgagtgccttttcgttttgatgagagaacataaggtgtttgataattaatgaaatggcaagaaagaacagctgatgaattagcaccagacttgattgagaaatatcaactaggtcccattgcagccaaactttttgcattgcggggtattaatacagacgaaaaacttgatttttggtttaatgcaacagaagaaaatctggctgatccagcgttaatgcatgacatggataaggcaattaaccgaattaatcaagcaattgatagcggcgaaaagattacaatttatggcgattatgatgctgatggaattactgcaacgactattatgactgaaaccctaagcattttgggcgctgatgttcattattttattcctaatcgcttcaatgatgggtatggtcctaatatggaccgctatcaagatattgtagctgatggaaccagattgattatcactgttgataatggtgttactggggtcgaggaagtcaaatatgctcaagaacataatgttgatgtaatcattacagatcatcatacttttcaagaaaagaaaccggcagcttatgctactgttcattgtaattatcctggccaaaaatatccttttgatgattattgtggtgccggagtagcttacacgatttgtcgtggtctaatgcaggatactatgcctgagctgctagatttggctatgatcggaactattggcgatatggttaaggtgaccggagaggggcatattatcgttaagcgtggtttagaaatgcttaatcagacagatcgtcctggcttgcgcgctctaatcaaaaatgctggtttgactttaggcagtattaatgaaactgatgtcggctttaatattgctcctcgattaaatgctgtaggtcgattagataatgccaacttggcagttgagcttttgctaagtgatgatgaccttgaggcccaaaaaattgcagataagatcgaagaattaaacaataaacggaaagaattaaccaccgaagtctatgacaaatgtatgacgttaattcataaaaatagctggcaaaaacaaaatactttggttttatatgaccctgaatttcacgaaggtgtgttaggtttagtagctaataagatcgttgaaaagacacataaacccacgattgttttgactaaaaatgatgcaggtgaggttaaaggctcaggtaggtcctttgctggtttcaacttgtttgatgctttaaatccgatcaaggatcaatatttaaccaaatttggtggccatgattttgcctgtggtttatcattagaagaaaatcagattgcgccattacgggaaaaatttgaagatgactttcatgttgaaggtggtcttgagactaaaaaatatgacatggaattgcctatgcagggcttaactccgcagacactagcacaaatcaatcaagtaggtccatttgggacaggtgacacgcagccaatctttagtatctctaatccaacaatcactcatttctttaaaatgggtaaagataagaatcatgtcaaatttacggttgctaaaaaaggcggtaacttatcagttattggatttaataaaggctttttgaataataatcttttgccgtttatttctcaaatttttgttcaattatcattaaatacttatcgaaatcaagtttctttacaaggaatcatgaccggactagcttttgcttcaccaaaattggcagtgccaacgccagttgttgacttacgccaagagaaatatgttatgggtttcgcggaccgctacctgttatttgatcaaaaaaatattccgattgttcgcaaccgactacagatcgatgaagacaagatctctttagttaaagattatgatcaaactggtgaaacagttgcattattagatgtgccacgcaatcagattgaattaaatgctgcattggagaaagattatcaacaaatctatttacgctttttgcttgatcaattgcctgttgaacaaattcccgctaaaaattattttggtgctgttttaaaatatatttatagtcaccctacgttaaagccagcagattaccgtacagttgcaccttatttgggactagattatgatagtgtgcttttcattttacgagttttctttgaattaggctttgtaaaattggatgaaggtaaattggtaggagagccttctcctaaaaaacagccgctgacagcttctaaatatttaatgggaacttcttctcagattaaatttgttaatcaactaagaactatgcctagtcaacgtttgattacatatgttaataatttgacaaataaatagataactattctgttttcagtgcttttatcgttaaaatttgttaaaatatactggtcaaaagcgtttgaacacaaacacagagcattttggaggttatgcttcttatggcagttgattttagtaaatatattgcaagtgttaaggattttcctaacaaaggcattgtttttcgcgatattacaccaattttgcaagatggtgaattgtatcgtgccgctactcatgaattagcggaatatgcaaagagtaaaaaagcagatgtaattgttgggcctgaagcacgtggttttattgtaggttgtccagtagctactgagttaggtttaggttttgtacctgcaagaaagccacataagttaccaagagaagttgaacgtgcttcctatgatttggaatatggttcaaacagtttggaaatgcacaaggatgcgattaaacctggacaaagagtggttgtctgtgatgacttgatggctaccgcaggtactttaagagcttctaaagagctaattgaaaaccttggtggtaagttagttggtgccgcattctacatcgaattgccagatttacacggtagagataaattacctgatgttgatatttattcacttgttcaatatcatggtgcttaaaatagaataaataaaaagagggaattaaatcaatttgaactgagacctaaaagttagacacttttaggtctttttctacgtaaagtcaagcataataagaagtttggcttcattttttgtttaaatttcaacttaaacatcttttagtgtcgatttatttttttagttagacacgacaaataagcccagatccatatctgatttttgggcttagcgttataatgtacttgatcaattaattacgactaaagtctttttgattatgtgtggctacgttgtaatcatatggttgatcattgataatcagggcataaatggttctgattagtttatgaattgaagcaatagctatctttttgaaccctttggtttgagaggatagctttttgctttcataataatctgctatatgacacggatttgtcttagctgcattatcaatttgtccaatagctcgataaagcaacttacgtgcgactgcattgccatgtttagtaatacttaaattagagtccatttctcctgactgatatctgcctggatcaattccgataaaagcattgattttattaggattactaaatctgcgtaaatctcctaactctgctaaaactctgacagcagtggtctgtgcaaagcctggaatgctttctaggttttctaaatcatgattaggcaaagacttcgctaacttaaccattcttgcgattaaattttctctttgatcacttaaattaagcaatctgtgtgcataatactgcacttgctcgacttctatgctagagcaagatacaacttgataagcttgataagctaattcaattaatttatctgcagtccttagagcgtgtttaaaagcaatcccctttaagctcattaaccagttaataagctgttttttatcttctcttcttactaagtcacaatgaggatatcgcacaactatttgccagtaatttttacctttagcagaagaaaataaattttcaatttcaggaaaagtcgattgtagagcttggtgaagtcgatttttagctattaccaagtcacttgtcagctggtcatagaagcggctcaaagcattaagctgcttataagtttgggattcgctttgattaaccggatggcgataaagtctttgaattaaagctaaatgataagcatcagttttatcggtcttgttgtagcgtagccccatattcatctcttttttggctttaagcggattaataacaacatattcatagccgtagtcttcaagaaaagcctgcagtctgcgtgaataaacaccggtagcttcaaaaataatttgcggatgtttagaaaaagcggttaattcatgaagcaattgaataaaaccaggacgattattagtaatggttagttcatttttgctttcaccaattagttcacaaacagtagaagtagacttgcttacatcaattccaaaagtaacttgcataataaaaacctccaaaacttagtagtaaaacgtatttacttaagaaatcagatctaattttctaaactcgacatctagtgtccacattcttcgaagagactattgaaaacttaagtaaaactgccagtttattatgcgacatcaagtgtctaaagacctcagggcatatcgttttaccactactttaattctacaaaagaataaaaatagtgaatcaattatcccgtcggataactaattcactatttagcttagaatgtttattatttgttaccgattaatttaaattttgaccatggtttaataaagtcgagcaggaataattcgtctgatctaatagaaccgactttgttcatccttgactccttatgaggttcaaggacaatttgtagttcatttttgtaatgaccaaagttgtcgttaccaatgataatatctccgcgttggaattctacattgttgtcgtgtactggattaggaatatctgcataagttacacggggcatggttgaacgaattacatccttagtgatatcaccacgacggaaatgttgaggcgcttctacgatagttttctcaatcttattaacatcagtaacgtagtttacgtgcaacatcaattgatagcgattaactttagataaggcttttaactcggcttcactggcataagcattaccgatgattacatcatcaatcaacccagaagcccagagatgcattgcttgcacatcaattggtaaattacggtcttgctcaagcgttggtaaaccatcttccacgttccaaggtcccatttgacctacttgacttgagacaaaagcggctgaatgaatgccaaactttttgaagcgttcagaacaagcgataaagaagtcgtaaggtaagccagtaccgcgttgaggataaaaattgtgacagccataaataaacggtgtattagcttggtaagaaataatattgttaagatagtcaacattattactcatgttgagttcaatgattagaccatatgggttgtaagaaagcattgcttcaattgcaccatcaaatgttgtgtcaagacggatgcctgctgcaccaatatcagcaaaaaatttcaggtcatcatagctgacacctagttgtttgaagattgcaggattaacatctaaaaaagtttgaaatcccaatttattgccatattcaatgatttttttatacttagctttggtttcttcagggctgccttgtacttcaagcatactcatgaagatacgagaaaagccatatttgtgagctaagtccagatagtgagcgttgccttcaaatttgctgtggcctggataaattgacagacctaaagatctcattgtcataatagtacctcatttttgataattgtctataccaattatatgatattttttattgtaggtctagtccaaagtgaccgagatagtttatattttggtagggtgtctcgctacgtttttaattaaacaggtgttatatttaaagtacagggtatgtgttaagaaggagaaattaagatggataattttgatcaagaatctggtcaacagcaatatgctaatgattcaggattaaatgttttttagcaaaatatatggttatatggccttagcggttttcgtttcagcaattagtgcttatttgacaatgacggtttttgcgggacctatctctgcctttattgcacaacaccaattgtttacggcgttacctttgcttttattgcaggtgcatatagtggacaaaatattgcttcagcatttgtagcttcggcaaccgtctttgtaacaatggcgattttaggaacaattaccaaaaaagatttgagtcgaatagggtcttatgcttctgctgcgttaattgggttgattgtagccatgttagctaatttgtttttacataatccaatcattgactacgttttttcgattattgctgtgattatatttactattttaactgcgtgggatgcacaaagaatgaaagatatttatttacaatatggtgatgatctttcaactaatgggcttgcagttttaggtgctttgcaattatatcttgattttgttaacttgtttttacaatttttggatatttttggtgcaaatgaagataagtaattaaactagtgagactgtaaaatagtttgtgtaaggatgaatgattccttaaatttatttctttaaacattagaaaaaggagttcctttctcgtatgattggtttgaacaaaaaaacacatacagaaagaagaactccttcatgaatgattttaccaaagattttgctcaagctctattcaatccagacaaaataaatgatttattgcgcaaagagctacaacaggctgttaataacttgttagaagctgaattgactgcctttctgggctatgatccctatgccagaaatggctggaatactggcaactctagaaatggtgcttatttccgcaaagttgatacgcaattttgcccaattgaagtgcaagtgcctcgggatcgcaacggtcaatttcatcagcacacgctgcctggctacaagcagcactcggatatcttggaaagcatgattatcaagctttactccaagggcgtgaccaccagggaaatagccgatctaattgaaaagatgtatggcagccattacagtccagctcaggtatcaaatatttccaagcagatgattccaaaggttgaggcttaccacaaacgcaagctaagcgacaagtttttctgcgtctatttggatgcgacataccttcctttgcgccgagaaacatttgagcgtgaagcagtctatattgccattggcatcaagcctaatgggcacaaggaggtcattgactactgcattgcacctagcgagaacattgaagtctggacagatatgcttcaaaacatgaaatcccgaggcttgaagcaagttgagctctttctttctgatggtgttgttggcatgaaagcggccttgaccaggacttatcctaaagctcattttcaacgctgcttggttcatgtcatgcgcaatatctgtgctaaagtacgcgtcgacgatcgtgaaaagatcatgaacgaattcaaacaggtgcatcaacagacaaacaaagaagaagccacagctgtcctgcatgacttctataccaaatggggcaaggtttacagccatgttatcagaagcttgaaagacatagaaccagatctgctggtcttttataactatcccaagcagatcagagcttcaatttattcgactaacatgattgaatcatttaacaatgtgatcaagcgcaaagctaagcctaaggcagagtttccaactgaacagtcgcttgatgcttttattggcattcaggcaatgagctacaatgaccgttatttcaatcgaattcataaaggctttggtcaggttcaggacaccttagaatcctactttgattaaataaataattaaaaaatcaatttacgagaaagaactatttacacaaaagatttgacagtttcaaactagtttctaataaacgtaggaacacttcatatataaacgtatactatataaatatagtgacatattaagggagtgtttttatgaaaagatgcaagaattgggttgtgactattgttgcatttctgatgttagtgggagaaatcagtgttctgcctgcaaatttgcaggggtcgacatcagttgttaatgcagctattcatcacagaaggagaaagcatcaatatcgtgataaaactaagatttataccagtaattacagaattgttgataataaacgatcaaaaatctttcacgtaatgcgcggtcataattatcgaatgaatcgtgaaaatgcagttttcttcaagagtaaagcagcagcacgtgcagcaggatatcgtgaatcaaaaagataaattaaaagacttctaagagttcaaagttcctagaagtcttttaatttataaaatttatggtaataatatacctgtttttcatcacaggttggtaaattaagtcgattattatggcagcaataatcgctacaattacagtaattgctaagttttgaatggaaatctggaccattgcccaaccacaaagagctaagataaaggtcaatagaacatctgcaatttgaacactaccaaccaacttggatgggtaatcttgccaaaagtacttacgagttctagtaatcaaaacaatcaacattgcgctaagaactaggtatacgtaaaccatagtagaaacagcaccgtgactccaaccgtgtgtgtttaagaaccaaacaaacccaataccaattaaagtccaaccagcagctagtgaaaaggcgatcttagcaagcttagccatattccagttttctggcttataagtaatgtgagtcctgtcagttccaatcatcatcgtaaccatattgttcataatggtatagataaccattgcattcaaggccattgggatgtagtcaaagaaaagatagccaaaagttaacagcatcgttaattcagcagttctagcaagcttggttagtgaccaagtagtcattctttggtatacgcgatgtccagcgtctaaaattttaacaattgagcctagaccatcgtctagtaataccattttacccgaacgcttagctacgtcagcagcatttgaaactgcgattcctacttcagcttgttttaatgcaggcgcgtcgttaactccgtcacctgtcatccctacgatatagcctttttcttggaaaagctttaccatcttgagtttatcttctggtaaaacatcagcaataccggccaaatcattaatatcagtattttcattgaaatcgtgaatcgaaattactttaccagttaaatcaacttgttctgccactgcagcagcggtcttttgattgtcaccagttaacataattgggcgaacgccacgtttcttgagttcagccaaagctgctttagagtctgttctaactttatcttgtaagatgaagacaccagctaacttatcgtcaatcaagactgccactgagcgtcctgccttgaaattaattccagaaatttcttcatcggcatgtttatcgatcaaagataattgcttaaatgaaccaagctttacattatgtccagcaacatcagccatagaataaccagtgtcagaagtaaatggagtaaagttttcagcattcatgactggaatgttattttctactaagtattcatcgattgctgtatcgataataccagcattacgtttatcagttgcggctccagctaaagcaagcacgtctttgtcaggcaagtcacttagatcagtccaagcggctacggcagttttgttttccgtaattgttccagtcttatcaagtaaaagcaagttcaagttagctgcgtcctgaattccagttaggtcagaagtcaggactccttctttacttaagcgggttgcttcaaatgagttggataaagcaaaagttgatggcattgctacaggaattgaagcaataaacatcattgccaggaatggcaacatattaataaaggtattgaaattaccgcctttgaagaaggaggcgataataataactaaggttaaaacaccatctagtaagcaaaggtagtagataatcttagtcaaaagttgttgtaagtgaccaggagcagcggaattgttgatcaaattaatcgtcttaccgcttctagaatctttacctgtagcagtaacaacagctaggccatcaccttcaacaactgtagtaccggcaaaggcggtgtcatcaattgctttcttaactggtttagattcacctgtaattgagctttcatcacaagctaagttaccgtcaacaattttaacatctgctgcgagtacgtccccgcgtttaagtgagattaaatcgcctttaactagttgtttagaatcaagtttgatccacttgccatcgcgttcaactgatacagtaggagtcaacttgtgtgaaatattatttaaaactcgtcttgattgctttttcttagatgcaccgttaaatgcagcaaataaaagcatcaacaacacgaataatgattggacccatttgcccaagatacattctagaattaaagcagcttctagaatccaagcggataggttccataacttagacaagaactctttaaagaaattgtattcaggctctggtacttcatttaagccatcttcttttaagcgcttgtctgcttcggcttgagttaagccgtgaaatttatcagacattattttccctccaaatctaccttaataaggtagcacagatattgctatgaataaaatactaaaatacaatataagatattaaatattttaatatcactatcaattgaaataaaaaaaggataaataatatgaatctaaaacagttacgttattttctagttgtagcagaagaaaagcagattacagcagctgctaagcgcttgtatattgcacagccaccattaagctatcaattaaaacaattagagaaagagttgggcgcgcaattatttaaaagaacggcacatggtattgagctaactgatgtgggacaaatttttcaaagctatgccaatgaaattatttctctagctcaaaatgctgaaaaccaagtacataagactatttccggtgaattgggaacgattgcaattggaatggcatcttcctcaacgggcttgataccaatgaattcttttaatgaattacgaaaatattatccggaaatttcttttgatatttatgaagataatacttatggcatcctggataaattagaaaaaaagacaatcgatctaggcattgtacgaacgccttacaaccagacaggtttaaatactaagactttaacaactgaaaaaatgatggctattagtgtagacccagattttcagccaaaaaaagaattacgcattaaagatctagcagatcagccattgattatttatcgtcgctttgaggatatttttaatcaaacttttgcacatcatgggcttaaaccattttatgcggttaagtgtgatgattcacggacagcaattacttgggccaagagaaaaatgggagtagcgctagtaccagaatcaattgcgacaacttatgcccaagaaaatatgatcgcaattaaacatgctaattggataacacatttgcagctggtttggcgtaaagatcatcaagttacacctttaatgaaaaaaatcattgctgcaatatgataatactgtaacttttacctaattgatccataataaatgtaaacgggtacaataattaatagaaggtggttgaatgtcgagtccgattcatgtttattcagaaattggtaagttaaaaacggtgatgttacatcgaccgggaaaagaactagaaaatctagccccagatattttgcatcgaatgttgattgacgatattccttatctgaagattgcccaagaagaacatgatgcttttgcgcatgtattgaggcagcaggggatcaaagtattatatcttgaggatttattagcagaatctttaacagatgagaaagttcgtcgggcattcttagatcagttactggatgaatcaagtattaaaaaacaggatcctttgcatcaattattgctgaactatctccaagaattgctaactaaggaaatggtaaaaacggtgattgctggaattagaaaaagtgcgattcataattctaccccatctttagcagatttggctgaggacccagattaccctttttatcttgatccaatgccaaatgtatattttactcgagatcaacaggctgcaattggttcagggatgaccattaaccggatgactttcagagctagacgacgtgaatcattatttatggaaacaattttgaaaaatcatcctgatttcaagaacgcaactattccagtttggcgtgaccgttatcatcatggtcgccttgagggcggggatgaactagttctaaataaccatgtgttagctgtaggtatttcacaacgcacttctgcaactgcaattactgacttagctcataatttatttgatcattcaagttatgatacgattttagcgattaagattccgcacaatcatgctatgatgcaccttgatacagtttttacaatgattaattataatcaatttacggttcatccctttattttagataaagccggcaaaattgatatttatgttctacagcccgatgatcacaacggtgtaaaaatcacagaaaagaatgatttggtgcaggttttgaaagaaaacttacatttaagcgaattggatttaattccaactggtggtggtgatccaattgccgcaccacgtgaacaatggaatgacggctcaaataccttggcaattgcaccaggtgaagtcgttacttatgatcgtaattatgtatccaatgatttgctaagaaaacatggcatcatcgttcatgagattcggtctagtgaactctcacgtggtcgtggcggtcctagatgtatgtcgtgtccgttgattcgtgaagatttataagaggcaaaaaatgaaatatttacaaaatgtttttcaaggtagaagttttctcgattgtaaagactatactccagctgaaatttcatatttaattgattttgcattacatttaaaagaacttaaaaaagagcatatcccacatgaatatctgaaaggtaaaaatattgcactactttttgaaaaagcctcaactaggacgcgatctgcttttgtagtagcttgtaatgatttaggtgctcatccagaatatctaggcgcaagcgagatccacttaggtaaaaaagaaagcgtcaaggatacggctaaagtcctaggctcaatgtatgatggaattgaatatcgcggttttgctcaagaagatgtagaagagctggctaaatattctggcgttcctgtttggaagtgggtgatggccgcgataatgttgccgacagtcttttagtttgtggctcaatgttaggtgttaatgtacatattgttacacccaagcctttgtttacacatcctgatgtacaaaaaattgctcaaaattttgcccaagattcaggttcaaaaaatttgatcacagatgatattgctcaaggcgttaaaggagccaatgttgtttataccgatgtttgggtttcgatgggtgaaaatgattggtctgaacgaattaaattattaaagccatatacggtcacaatgaaaatgatgcaaatgactggtacaccagatgcccaattgatctttatgcattgtttgacagcttttcatgatcgaacaactcaggtgggagaagaaatctatgaaaaatatggcttaaatgagatggaagtaactgatgaggtctttaattcaaagtatgcttggcaatttacagaagctgaaaatcgattgcattcaattaaagcagtgatggcggctactttaggaaatttatttattccgattgcctgtggcggtggtggcatccttgttattgtgaaagatgggcatctcagaggtgttgccggcgtaattcataaagatttttccgctgctaaaatggcagaagatatcaacgctgatgaattagtaattctaacaacggtggatcatgcatttttgaattatggcaaagaaaatcaacaagcaattggtaaaataaaagttgaacagctcaaacaatatctagcagcaggttatttcgcagctgggagtatgaagcctaagatagaagctgcaattgaatttgtagaaaaaacaggtaatttagcaattatcacctctttgagcaatgccaacaaactagcagacggagtcggcacaatcatttataattaactgggtgataaaaatgaatatttttaatgaaggaaaaaagcaggatattgcccaagttttagcagctaaagataggcgagtagctgtacaacataagatttttaataagtatcctaatcaaactctagtcgacattaatatgaatatcccaggaccaatcaagaataatcgctatttaactaaaatgtttatgttgggtatcaatgagctggaaaatgcttggactaacctaggttatcattttaaattggtgacacagcttaatgatgatagtggctgtgaaaacttttatgtattatctttgtcaattgaaaaagtaaagcgctcaacaattgattttgagaatcagatatcattgggacgtctctttgatgcagacgtgttggtaaaaaataaacaagctgcaatttcacgcagagatttgggcaggcagccacgtaagtgctttttatgtgatcgccctgctaaagaatgtgctcgcagccggagacattcagtggaacagatgcaggcatttatctctcagctttatcaagaatacgttgcgtaaaataaaccgggattttatgattccggtttatttttatgaaaaatctagttaaaaatttaaaaaatgaactaaaatagtaatgaataaatttatagatgtacgtataggaataagcatggaattaaagaaaaataagaataatttaaagcaaattacggcattaattcaatatgcatttttgaaaaataatgatttgactaaagacgaaaattttatgagtcgttatgatcatagtacaggttatggctattttgataaggaaaaattagctagctatattatggttaatcgatttaaaagtgatgtttttgggcatcatttaccgatggctggaataggttatgtagcttcatatcctgagtatcgtggccaaggtcatatttcccaattaatgaaagaaattttgcatgacttacataggcaagatattccgtttgctaacctggcaccattttcggagagcttttatcgccagtacgggtttagcaatagtatttatcaaaaagaatatcgctttgatggaagcgcattgcgtagttttaaattaccacgttctggtcatatagtgcgtggcaagtgggacaatttagctgttcaaaatggtgtgattcaactttatgaacgtcaactgcatactgatgatgaacgtaacacggttgtacgtgaggcatggtggtggaatagacttgattcttattatcatcaccgcaatgtagccgtttattttgacgcggatgagcggccaattagttacttgatttatcgcattagagacaatacttttttagctgatgaaatgtacgcaattacgccgcagggattactgagtatgtttggttttatgggttcgcacgcgggcagtgttaagcaatttaaaatgagcgtaccagagaaatcgttacgagctgaactttttcctgaacaaaacgaactccaagttgatttgcgtccttatatgatgagtcgaattattgattttgaaaaagttttggcttgtatgcggccaatgcaagaaggtgattttaatctggaagtcaatagcgatgaacagtgtccttggaatattggagtttggcaattaagtaatcatggacgtaaggtagcggtagaacgtaaggaagatgcattggttgatttttcgggatcaattaccgcgtggacccaggtgctattaggtagactaaccatgaatgctgctgttaaactaggattaattacagattaccgcatcaaaaaattagatttcgttaaaggcgatgtatcattttatgattatttttagttgtgaggttaaaaaatgagtaaagaaaagaaactcaatttaataaaattatttggcattgtagttagtggtttgaatttgatcttttttgccttgatggcacttaataagcatgaagatactaaggataaaagaagagtagcagaagaaggacacgcaccgctggatgaaaaataaaatgacggaattaaagattgcatattttgaccaattaggtcgtaaggaattagatcaggcagtgcagcattttgtgttaaaacatcctaatgtagatgtaaaactacttgcgactagtcatgatggtgcttttgcaaaactgaatgaagatgaagcagacatagcaatcaatgatttgcgtgacgagaatcttaactttgatgaaacagaattgactcaagctggtgtaatggcaattttgcccaagggaatgtatcctaatggcattcaaatgattgaaaaagacgagctcaatgatatgacttgttttattgtggctaaacctgaagaagaggttagtgagctacatttatttaaagatttgtatcaaattggcagtcaattcatcgcttctaactcggtcgaagaagcagcactgttggtcgcctctaggtctggctattttattttaaatgagaatacggctaggttaattaatactacagatttgcagccacttttcttgcttgatcatggtcagttaataaagcaaaagataatggctttttataagtcaaattcagcgttaagtagtgagtttataaagctattgcagcaagaatattaatctgtaaagttaaaaatatcttgtctaagtactataagatactgtaaaatatattatgaaagcggactcatatattttacattctggagatgatttttatgctaaaaagaactttgttacctttaacatcaatggtacttgttttaggattaactggtttggctagtcaagttgagactgttgatgcttcaacttatggtaatggtgtacaggttactattccaaaaaagatgcagggtacttggtactcttatgatcgtaatgcacataatggcacaaagatcacctttactgaacatactgttaatggcaaaccaatatttacccaggaggcttcgacaattagtgattacttcaatggtagaattgctaaccagaagaactttgataaggtaacgcaaaactggatgtctggtaaaactaccaaaatgaagaatgatacattctatgagattgatccgtggattacttttgaaaattggagtctttatcgagtggtaccacaaaccattaatggtaaaaagcataacgtgctggtttattctagtagatatgatggtggtaactacttcagaagcaagaaattagctaaaaaaatgaaggactacaagtttaagaaagttaattacacgttatagttttgtgacatcccttaactaagggatgttttttactaatagacgcgataaaatttagtataataatgacaaaattaattcttggaggagaagttatgaaattaaaacaaacaccaattttgcgtttatataaactagaaactaataaagaggatcatgcaaagttcgttaaggcagggcaacataatatgcttacttctcaagaaaacgaaccaggcacattgtttatgcagacaagtcatgacgaagaaactactaattttgtagtagaatgctatcaagacgaagcaagttatgatactcatgctaattcaaagcaatttaaggattttactgacgttgctaaagatattttaactagtcgagtaaaggtagaattgtttccggaatttatttctacaaaggcagaaaaactagcagttaccggatcaaatgattatgttatttatctgactgaaattggtgtttctttaggtaagggcgatgagtttgctcatgctgtaatgaaagaaatgaaaacggcagtcgaagaagaaaaagatattttggcaatgattgcaggaactgttgccgatcaaccaaatgaatggttagctattgaagtttatcgtaataatgaagcttacaagcagcacttggaaactaagaacttcaaagagtatttgaataatacaaaatattgtgttgaaagtaagagtttacgtaagttgcaaccagatgtaattgttgaccaaggtgcaattttctaccaaccataaagaataagacgaaaagaagaccaggctatgtggagtacataacctggtctttctagttagagggaaaaagatttattaacatatattattctggtttttagtggcgatgttttacctttgctactgctggtttattaattaatactgagctgatggccattaaaccaagcgttaaaaatgatccaccaattaagagtagtttaatcaaggttctcattcctttcatcttaattgatcttataatagcgaaataatattaagaatttatatgtaaaacctaatggattagttaagaaaataaaactagaaaaaaggctggttagcacgtaaaatagaaatagagtcaaagtctagtgcaactgcgcataaaataaagcagtatcgatgggatgctgcttgttttggttaaaaaatagagaatatgcttgtagcccttttcgtaaatagcgttaatgttgtaaaatggaaagtgcattaagtttattaatgagaaaattgatgtattattgcaaaataggccgtaatggccctttttgttgtgaaaaaattaaaagaatataggattggaaatgccaggaatagtagagcaaacattattagaacaacaaaatattgatttaaatgaaatggtaacaatgaatcaaatgattgatcaattgttgcctaatgcaagtaaagaattacaacaaaaactaaagattaaaatttataactttgtgcgtacacgtaaacaaccaagtattactgtgcgaagaagaaaatattttaagccggctgttgctaaattaattattggtaatgtacaagattacgcagatgcaattgaacgtcgtgctaaggaagccccagctaaagaggatgctactgataagaggccagcttctaaatctaagcgggttaagacaattactaagcgtaagattttagctaaagttataaagaatgataagattgataaatctattcaaaagaaattagaggataagattgcttcaattgtgaagaccaactttattaagccagttaacaagcggggaagtttttcggttgaagatggtgaaaaagttatagctgaacttagtcctttttatcaaaatatcaagattgatcaaaagtatcgcaagaatgctgaaaaagcggctgaaaataaggaaacagaaactaaagaaaagcctgagcaacattctaaggatcagaatgaaagtcgtgaaggtcaatctaaggactttgagcgtaagaataatcagaagaatagcaataatcgaaataataataatcaaacgcaaaatcaacgtaagcgacaaaataagcatccttttgagatcagaagagaaaataataaccgctcacgtaataatcagtctaaccgccgctataataatcgaaataattatgataatcggaataattatgaatttgatgaagctagcggtttgcgtgaacgctacaatacagtaatcagaaattacaatcaactggagcaaagatataatgctttgcaagataaatataatcaggctttagatgataaagctagattgatcgaagaaatgggtaagaagaacgaagacttacgtcgtgtattgatcgacgttttgcgaaaaatgtagtttttggtaaacaaagagactagtagtcaatttgaattgattactagtcttattttatgtttatgaaatatgatttagcttaaaaattaaaaaaatatgtgtaaaaaattatttttgtgtagtaagattaaaggatgataaatatttttattaatgattaatggaggagaagtatgagtttaaaagagctatttaaaagcaatgtgtttcgaggaaactgtcaaatcttttgtgtaaatagatttttctcgtagattgattttttaatcttttatttaatcaaagtaggattctaaggtatcctgaacctgaccgaagcctttgtggattcgattgaaatagcgttcgttgtagctcattgcttgaatgccaataaaagtatcaagcgactgttcatttggaaactctgctttaggtttagctttacgcttgataacgttgttaaaggattcgatcatattggtggagtaaattgaagccctgatctgcttaggatagctgtaaaagaccagcagatcaggctcaatctctttgagatctctgatgacatggttgtacgctctgttccacttgtcatagaaggcgtgcaagactttgatcgcagcttctttatttggctgttgatggatttgcttgaattcattcatgatcttttcacgatcgtcgacgcgtactttagcgcagatattgcgcatgacatgaaccaaacagcgttgaaaatgagctttaggataagtcctggccaaggctgttttcatgccaacaacaccatcagaaagaaaaagctcaacttgctttaagcctcgggatttcatgttttgaagcatatctgtccagacttcaatgttctcgctaggtgcaatgcagtagtcaatgacctccttgtgcccattaggcttgatgccaatggcaatatagactgcttcacgctcaaatgtttctcggcgcaaaggaaggtatgtcgcatccaaatagacgcagaaaaacttgtcgcttagcttgcgtttgtggtaagcctcaacctttggaatcatctgcttggaaatatttgatacctgagctggactgtaatggctgccatacatcttttcaattagatcggctatttccctggtggtcacgcccttggagtaaagcttgataatcatgctttccaagacatccgagtgctgcttgtagccaggcagcgtgtgctgatgaaattgaccgttgcgatcccgaggcacttgcacttcaattgggccaaattgcgtatcaactttgcggaaataagcaccatttctagagttgccagtattccagccatttctggcatagggatcatagcccagaaaggcggtcaattcagcttctaacaagttattaacagcctgttgtagctctttgcgcaataaatcatttattttgtctggattgaatagagcttgagcaaaatctttggtaaaatcattcatgaaggagttcttctttctgtatgtgtttttttgttcaaaccaatcatacgagaaaggaactcctttttctaatgtttaaagaaataaatttaaggaatcattcatccttacacaaactattttacagtctcgtttcgagcctgcattattatcttattgtatgttttatacgcattatttgggagttttagtgaatatttatttaaatatgctctgaattcaattactgctggtaattttaatacatatgtttattggcaaataatgcagtttgttttagcattattcacttcgttgcttttaccaattactaccgttgttttcactaggcagacgcaaaactatctgcataaaattcggcaagaaatcatgcatcattactattatgaaaaaagtgatgaaaaagtctctagtatgcagaaccgattaacagccaatttaaaaatcttatcagatgattatgctacaccttggattactatcttaagtggggttttagagattgtgattgctattgttttactagcaagcatgaactggattctaattttggttactgccattttagctgtgattacactttttgctcctaaaattatggagaagaaaacatcagctgccacagataaagtaaataaaaagaatgaaaagctgttaaatacaattgctcattggcttggtggattgcaggaactacgtcgttatagtgcatacagtcgtttggttaagcaaattcatcgatcaagtagtgattatgtggacgcaagtaagggtagtgcaaaattaagaagtgtaagttatttgattaatgcttttagcaattcaattgcacaaattggtatgagctttattgctggaatcatgtttttgcttaatatgatttcattcggtgattttgcagttgctagtggttttgcatttacgattttttcagcaatttggaatattactcagtcgttaacgcaagttaagtcaactaaggctttacgcgaacagattaccgatttaagaaagcaagttcctgatgaaaataaagataaagtatcagcctacggtcttaaagtttcaggcttgtctgtaaaatacgatcagggggaaacaattttttatcctgattttacaataaaaaaagggcagaaagttttgcttactggcgattcaggaacaggaaaatcaaccttgtttaatgttttgttaggtaagctaaaacctgaatctggtacggtgacctatctagatgaaaatgaaactatcattcctgaaggaaaagctagaattggcaatatgccgcaaaatccagtagtttttcccgcaacgatcaaagagaacattacaatgtttaacgaaaatttgcaggataagcttcaagatgttgttcaagcagttcaactccaatccgacttagccaaaatgccagatggtgttaatacaacaattgatctaaaaagtgaaaatttgtctggtggacaacggcaaaaagttgttttagcgcgaacggaaatacacgagcaatcgtttgttttaatggatgaagtaactagtgcgatcgatcaaaaagctaccgaaaaaatcattgatgaattgctcaaaacagatcaaactattttgatgattgctcacaactttacgccagaattaaaagcaaaatttgatcaagaaattaaattaaaaagtaagaaaggggataaagtaagatgaatttgaaagcttttattaaaaccaatccagttcgtttctggttaactgcaattggttggattattattcctgctttatcaattaccaatacttacgttgtacaagaagagacgaatatccttttaagtcgtaattggactaagtttattttaatcaatgttcttgcttttctgattatgttagttgactatggtgtgagtgctttagttgattatcagcagcaggctcaggtacaagacttaaatgatcaagttagagataaaattgttaagcgatattattatgacgggaaaaagcatactgttgcacagatgcatagactgtaaaatagtttgtgtaaggatgaatgattccttaaatttatttctttaaacattagaaaaaggagttcctttctcgtatgattggtttgaacaaaaaaacacatacagaaagaagaactccttcatgaatgattttaccaaagattttgctcaagctctattcaatccagacaaaataaatgatttattgcgcaaagagctacaacaggctgttaataacttgttagaagctgaattgactgcctttctgggctatgatccctatgccagaaatggctggaatactggcaactctagaaatggtgcttatttccgcaaagttgatacgcaatttggcccaattgaagtgcaagtgcctcgggatcgcaacggtcaatttcatcagcacacgctgcctgactacaagcagcactcggatatcttggaaagcatgattatcaagctttactccaagggcgtgaccaccagggaaatagccgatctaattgaaaagatgtatggcagccattacagtccagctcaggtatcaaatatttccaagcagatgattccaaaggttgaggcttaccacaaacgcaagctaagcgacaagtttttctgcgtctatttggatgcgacataccttcctttgcgccgagaaacatttgagtgtgaagcagtctatattgccattggcatcaagcctaatgggcacaaggaggtcattgactactgcattgcacctagcgagaacattgaagtctggacagatatgcttcaaaacatgaaatcccgaggcttaaagcaagttgagctttttctttctgatggtgttgttggcatgaaaacagccttggccaggacttatcctaaagctcattttcaacgctgtttggttcatgtcatgcgcaatatctgcgctaaagtacgcgtcgacgatcgtgaaaagatcatgaacgaattcaaacaggtgcatcaacagacaaacaaagaagaagccacagctgtcctgcatgacttctataccaaatggggcaaggtttacagccatgttatcagaagcttgaaagacatagaaccagatctgctggtcttttataactatcccaagcagatcagagcttcaatttattcgactaacatgattgaatcatttaacaatgtgatcaagcgcaaagctaagcctaaggcagagtttccaactgaacagtcgcttgatgcttttattggcattcaggcaatgagctacaatgaccgttatttcaatcgaattcataaaggctttggtcaggttcaggacaccttagaatcctactttgattaaataaataattaaaaaatcaatttacgagaaagaactatttacacaaaagatttgacagtttcgtaatcgggactttctgtattgaaaaaatgaagagataatttgttattgatctcaatttttaaatcttttttgttaacggtaagcgtataacagtgtcgtttgcagataaaaccatttcttaataaaaaatctacgattggattttcatttgaatcaatcatgacttgcaatgcttggtgctctgcttgaactatttttgaaaatggaatatttacagagtaatcacttagattgaattttagataaatatatttgttatgaaaaagattgtgataagtagaaatagtgcctagatgcttatcgttatcagttactttgtagattttaggagatattttttcaatttttgtagtcattttttatccttttgataattgaaattaatttttgatcggttccgtttttaattatgaagttataaatcggttcataattgagcacagggaaaataagatcaggatcaattttaggtataatgtcaatcattgatttcttactaattacgttgagatttttaacttcttgagcatttcttatctttctttttgcttgtgaaggaggataaccttgtccccaaggctgttcaaaaagattttttatagtctgctcaaaattgatttcaccactccaaccccaattaagtcctagtggaaaggagacaacattgccgttattgatatgaccaaaaagaaaagcatcttgtggagtggggatataaccacattgaatattaggaaaagtatttcatgcaagcatcattccttgtccagaagtacatcctgtcacaatgaagtcagtcgccttgctattaattaataatgcgacagctagggaaacttgcacgtaagatagactagccgaactatcttgataaataccaaaattgaatacttgatcattggatcctacagattctttgatatacttctctaatatgaaatttttacttttttgcgatgtagcttgaataatacctattttcatatttttaacctctatagtttattttttgaaagcgctttataatattatataggaagtaaagtaagaaggtgaacgtgatgaaaaaaattattgttggaactcctgttaaattgagccatgttttaatcggtatgattgtggtagttttactttcactatttttgacaggatttggttatcaagcttggtggctattccttattgtactaattttaggtgtatttgtaactttacctacttgttttaatccgtattggcagattagtagcgaaaatattacaattataaattatgatattaacgatgtgataaaattgatgcaactgctagggttacataaaaagagtaagcaagttattaatttatctgatgtaaagaaagctgccgttgtctatcgtaaaaatgtacgtcttagtcctattgactttaatcctgattatttaaatttgattttggatttaggtaagggaacaaatatgactttgacacttggaaatgtcgactatcagcaactaaattcgattatgggtttgttacaagataagaatattgtagtagatgataaacaaaatattttgcaacttttaagagaaaataaaaacttgtttaaccattttcacaagaaaggctggacatcgctataaatggataaagagcaaataattagaaattattttcgagcatggctaagtcctaatcttgaagtagtccaaaatacatttgacgaaaatgctatttatagtgaatgctatggtccagtttacagaaataaaaaggagataatatcttggtttgaaaattggaataaacaaggaaaagtaattgcttggccaatagaaagactcataattaatggtgatacgagcattgccgaatggcattttaaatgtaattatcaaggaaaaattagtgaattcgatggtgtatcaattatagaatttaatgatcaaaataagataatttctgtaaaagaatatcaatcaaagtccaaacattattatccctatagtaaataagacttttaactgttaagaggttaaaagtcttattttgaatatgaaatcttttataaactaatttctgtggaaaaaattaccaagccagcttcgtttctttttagcctcttcttttcgtcgctgttcacgatcttctaacattgccttagctagcatatcaactgtttgagtcaattgtgcttggttatctctttgttgcttatctctaaatgaactactgttttgatacttattcattaacgtatcatcatcaagccatttatcaaagttttcaacatcaataataaaaccggtgctagtttgttgcgatgcaatgtgatattttctaggcaaatatttaaagtagcgatcaagcatagtagaaccgctgtttttcgccgtttgatcggagattttattgaaaagttctttattgatttgggcttttagccggtcatcttgtttaataaataagatatcgcttccgatttttgcttgattgattaacattccccaatcatttcgaccaacaaatagggagtaatcgtaattttcttcaaaatatttgctgacttggttatacatatcaaatttatcaagtgcagtttttaaaacatgcttgattggatataagaagtctctttcaatcttctgcgcatcttcaacactaacgttagtaaagaattttgctaattcaacttgacaatatttaaaaagatcatcatttgcacgactaaataagctagttaatgcagcattacgttgataactttcacctgaaaaagtagattcaaagcttaaataccataaacgacgcataatttcaggctttagagaaaattgtgatttaatagagctttcttgtctattcatcgtgaaaatgaatgctggtgagggatgagttaaattacgattgttagtaacttccttgatgaatctttcaaagtaagtacgggttgtaagctcgggactgacatcatcaatcattaatggacttacaggaccatttgtatatacatagtcacttagcgtgttggtaattgtcatattgatattactcttgccaagggcataattctttggatccatcattccactatctaagaaattatgagcaccaattaatttagcggctagtcttttccctagggtggacttaccagttcgaccttgtccgattagtgctgtagcaataggcacgtcttctctagatacattgcttccagataattcatataaattgcggattttccaaagccatggtgattcatatagaaacagcataaagtcacaagcttgccagccttcaccaacttctttgtaagtattatattcatgagtgatatcacagaaaagttgaagcgcattttttaattgcccttcagttaaatcagaagtaataacttcagaagggatgttatcaccaattttagaggcttggaataattgaccattattgtaaaactgaacaggaacagggaagagatcttcttctttttcaatttgtgatgtatctgcttttgcctttttgtcttgacgaataatgtgctgagtcaagctatataaatcttgcccgattgtatctagcttacgtcttttattgccaccttcaccaaataaagtaactgtttgagaagcaacgagtttttcattttcagataatttctttaattcatcatctttgctgtagtggtcgcgatacttttttatctcttcagctgggagaataattatgtctttaccagttgaattaggactgtttttgatttcaagagaagaatcttgcattacatgaatgcgaagatcgtctttatttttgtcttctaaataaccagatagttttttagcattaatataagttgtagcctgattaaggttatcttgaaacatttgttgatagcaattgaataatggatcagaagtattgccgtaatcccaaactaattgttccatatttttattaacagccgtatcggtaagattcattgaacctgaaaaggcagagtacttgctttgattttccattaaataaagcttagtgtgaatcaaattctgtttggtgaaaaaaagctgtaaactaccatctaaaatacgtttagtgaagggactatcttggtgttcgtagctatattcaatcaaatcacgacgtttatttaaaatttggtcaattcttttgccaattgaatttgatccattatcggttagtccaagaattagtgtgatctggtcaaaacgtggtataagattttgctcaataaatttaatattagaaacaaaggaaacgcctttaaactcagagaatttatttgactctctttgaaaatcaactaattgccaaaaatcggcattggaaattagtttttgatcagtatgatttagtatttctaatcccatataaaatcctttcgtgagtatacaaacatttgcttttagtgtatcgtgaaaaattggattagagcaaggaaaagttaatttattattgaatttatgaattagattaagtaaaatctgattcaaataacggaagtaaaaatataataatatgttatcgctttggagaaaattatgacaacagtatattttgtaagacatgctcaacctgatttatcagttcatgatgatttaacacgtcctttgacagaaaaggggttgcaagatagaaaaaaagtaactgattactttagagataaacacatcgaccaagctttttctagtccattcaagcgtgcaattgatacaattcaaccagttatagacgagaagaaactaacattatcatctatttctgactttagagaaagaaaaattggtgatgagtggatttctaattttcatgaatattgtgaaagacagtgggaagattttgattataagctaagaaatggcgagtctttaaaagagacgcagaagagaaatgttgctgctttgaagctagttttgtccaaatatcaagatcaaactatgattattggtggacatggtacagcaattggatcagtaattaattactatgatccaagctttaaatatgaagcctttgctatgatccagccaaagaatccatttattgtgaaaatgaactttgatggagaaaaatatttggagtataaagtagttactttttagtaaaaagataatctcataaagtaaaaatggtaaatcaaggtactaataaccagatttaccatttttttatttgttatattatagcttatgttaaattttatcctgagcaatgaaattatcataaatggttttgataactacttcttcatcttgccgtctggtaccaatcataattgagatttgggatgcaccctggttaatcatttgaatggagatgttctttttaccaagagggtaaagcaagctagcacataaagtcagcttgtccttcatcccttcacctaccaccattgtgattgcataatcatcaatccactgcatttgatcaggatttagactagtttgaatttcattacagataacatcaattaattgatcagttaagacatcttttttgaaaataatggtaatatcatcaattccagatggcatatgttcatatgaaacatgatgtttttgcaaaatttccattaacttcaaggtgaaaccagcacctttatttaacatatattttcttaaataaagggccgcgaagtttttgcctccggcaatacctgtgattgtgtgtttaggtataaagccgtcctctggtacgatcattgtcccaggtttttctggagcattagtatttttaacattgacaggaatttcgccttgaatagcaggaattaaggcttcatcgtgaaagacggaaaatcccgcataagatagttcccgcatttcttgataagtcattcttttaattggcttgggctgatcaacgatatggggattggctgaaaaaatagcatcgacatcggtgaagttttcataaagatcagcgtttaaccccctagctagaatagcaccggtaatgtcagaaccaccgcgagagaaagtagcaatatgtcctgatggtgtaatgccatagaagccaggaaaaatgatcttttcatcttttgcagccttaattctttttaagttcacataagtttcaggattgacttcagcattattagaagtgccagtgacaattaaacctacatcttttggctctaaaaatcgtgctttaattccttgatgatttaaaattttagcaatcaaaattgcattaagacgttctccgtgtgctttaaaggttgccatgcggtagtcattattagggtaacttagcttcggcaatgtaagtagaagctggttaatatcctctaattctgcttcaggcagctcaaaatattgggcaattaattcataacgcttaaaaatacgggtagcgatgtcttgataattattactcctcaagctcatatatgcgtaagtgatcattagatcggttactttaatatcatcctcagttcttttgcccggtgctgagactacaacgacttgtctttcgggatcggcattaataatacttagggccttatctacgctattacctgaggctagggaagaacctccaaatttaacaactttcatatctatttttccttaactattatttcaaatctaaaattgaactgatttctttttccatatcatttggttcaataattttttcggtcttgggttcacgatcaaaaagggcacgcacaccgattgataattgaccgcctaattcatcatgcaattctttaattgcaccgacgccagtttgcatactaggaccaccagtgatggcttcatacaccgtttctgggaacttatatggactggctgttgaaacaatgaccattggggtttgatcgccggtcttcttttgatattgatttgctacaaaagagccaacagcagtatgtggatcaattacatagcggtcataattgtagacccgtttgatttctgatttaacctcttcttctgttgcaaaaccagctgcaaaatttttttgtaatttagtgaaaacttcaccgctaacttgataatgaccgcgttgagtcaattgattcattaaactagcgacttcatagttattttcgccataaaggtcaaataaaagtcgttccaaattgctggaaactaggatatccattgctggtgcattggttaaatggaacttacgtcgcttatcgtagacaccattattaaagaaatcagtcaatacattgttttcattagatgcacaaatcaactttttaataggcaaacctaatttcttagcataatatccagctaggatgtcaccaaagttacctgttggcacagcaaagttaacttcgtctcctagtttaatttcttgtctgcgtactaattgtccataggtgtagaggtagtaagaaatttgcggaaccagacgaccaatattcatcgaattagctgaagaaaattgatagccattagcattaagtcggtttttgaaagaatcattgttgaagatttttttaacttcagtttgagcatcgtcaaagttacctttgattgcaattgcacgcaaattgttgccgcgttggctgagcatttgcttaagttgaacaggactaacgccaccttcaggataaaagactatgacatcggtacccttttgattagcaaagccacgcattgatgccgtaccagtatcgccagaagtagcggttaaaataataatatctttatcaatcttttcaatttgaacagctctggtcattaattgtggcaacatttgcaaagctatatctttgaaggcaagggtaggaccgtgaaaaagctccatgtaaaaatggttatcgtgcttttcgattggaacaatgctgcgatcatcccattgttcactataagcgctttgaactgcagtggtgatttgctccttagtaaagtcatcaaagaataagctaataaccatggcagcgatttgcttgtaggaaagtttggataaatcttctaacttaaaattagcttgaggaaaggcaacaggcacgtaaagcccaccgtcttgagccaagccttgaataattgcttgaggtgcagttaaagtgttttcttttgaacctctagtactacgatattgcataaacaatcttcctatcttatgaaatattaatattataactattgtaccttgattagcacctatgatacaatcgtaaaaataagaaaatcattaaaaagaggataagatcaaatggccatcaaaattgcattgcttggattaggaacagttggttcgggtgttttaaaaataattaaaaataataaaaagaagattagacaaacaagtggtgaagaaatcatcattgaaaaagctctagtacgtaatccagaaaaacatcgtaatttagctaacgaagtgatgctaactacagatttcgattcgattttgcaagatcccgaaattaaaattatagttgaattaataggtgggcttcatcctgctaaggaatatattactgcagcaatcaatgctggaaaaaatgtagttacggccaataaagacttaatggcaacttttggttcagaattgattaatttagctgcaagtaaaaagtgtgatttaatgtatgatgctagcgttgcaggtgggatccctattttgcggaccttggctacctcttattccagtgacattatttccgaaattcaaggaattattaatggtacgacgaattatattttgtcacaaatgggggaaaagggactaagctacgaggaagcgctgaaaaatgctcaagagctgggctttgcggaggctgatcccactaacgatgttacaggtaaggatgcagcatacaagattgtaattttaagcaagtttgcttttggtactaagattagtattgatgattttactattcaagggattaataatctaaaggattttgacattaaacaggctcagaagttaggctatgtcattaagctgattgggattgccaaaaatattaatggtaaattatttgtagaagttgctccatgtttgttgccagaaaatgcgattatggcgcatattaaaaatgaactaaatgctttacaaattaagagccaaagcctaggaacagcagtattcacaggcccaggtgcgggtagctctgcaacggctaattcagtcatgagtgatgtgattactgaaataaaaaacgtagtgaaaaagaccaccggtcagccatttagtaatttctcccatgttatgcaattaacaagttcggaggatgtgaagtattcctattatttatctttcgaagcagaagagaccttgtttgatttgagtaaattactctctgatttggaaattccggttcgtgagattaaacaagtacaatcaagaattgtagttgtaaccgaaaatattagtcgacagcagctacaagatttagcgattcaagatcaatatttaaaagctagctataagattttgcagtaaaggaagggaaaaaatgattattaaagcaccagcttcaacggcaaacttgggtcctggctttgattcacttggcatggctgtttcactttatttggaagtagaagttttaagcttagccgatcgctttcaggtggatcatgtgatgaaaggaattccacatgatgaaaaaaatttaattgttaagactgcactaacagtttatccagggttaccaccgcttcatttacgcgttaaaagcaatatcccattggctcatggtttaggtagcagttcaagtgctatcgcagccggaattgaattggctaatcaaattggtaagctgggactatcagatgaagaaaaggttcaattaggagctaaaatcgagggacatcctgataatattgcaccgactattttgggcggcttggttgttggtgctgaagttaaccatcattttgatgcagttgaagcaccacttcctccatatgcgttggtggcttatgtacccgattataatttggaaactaagacagctagagcagttttgcctaaagaattagcttttggcgtagctacgcatggctcagcagttgctaatactttaattgctagtttgtttgctcaagactaccctaaagcaggagaattaatggaacaagatgtattccatgaagtttaccgagaaaaactagtgccagaacttgtaaaagtgcgggaggtagctcattcaaaacatgccttagcaacttatttgagcggcgcaggttcaacgattatgacgtggattgaagataaacatgtagctggatttttgtcgggcttacgtaaacatgatttaaaagatgagacattaatcttacatcctgatgaacacggtgttcaaattatccaataaaaagactgaccaagcggtcagttttttagtcgtcaaaggttgcagcaaaactatcaccatcgattagcattcttttagcattgacagcataccaataaggaataacttcagtgccattttcttgctctaattcacagtcggccatttttaaaatttggtctaaatttttagcactgatgttagggtagagcttcagtaaagcttcttgagtaatgccactttgtttaaagccactagtgggataattggcagaaaaaatatcagaaaaatcatctaagtcatatctaggcttaaattctccatcaaagtatttgatttcgatgttttcaatttccataaaggcaccaagttgttttgccatgtaagggaacttattagctagttgttcaacagtaaaaccattgtttgctttagttcgtgcattgggatgcagtttaagccaagcttcacgtatattatgactatcttttctttcaataagaaggtctttgactttttgaatagctgcattgtgtctgtttacggctttttgccagtctaatcgattaggatataactgtctatagcggacagacaagggatgatcgattgcgttgtagataaaattcagcttgtcagtggtataagaagttagttcatcgtcacgccacattaattcatagtaagaactcatgaaagacacctttctatttggatagactaattaatattaactgaatagtatcattttttgctccgattaacaaaagtgataaaaatgtctatttagattggtcagaagcaaaacttttgttaaaattaatgtgtttactattagtatttgctcaaaggatttgacaaactatggatcaacttgataagttcaaccgacgctacaattttctttcaaaattgtcagctgccttcttttattcaattgcggttgcagttgccttgaactttttttggacgccggggcatatgtactcgtcaggaatcacgggttttgcgcaattaattaatactgtaagtgaaagatatctaccgtttacattatcaacatcaatgatgtactttcttttgaactttcctttatttatattggcttggttcaagataggacataaatttactttcttcaccatcgttgctgttgttctaggttctatcatgatgcacgctattcaaccttggcagatgcacctggacccactggtttgtgcgatttttggtgcttcgatcaacggtattggaactgggatggcattaaagaacggtatttcaactggtggactcgacattattggtattgtaattaggcaaaaaacgggcattagttacggaaaatttaatatttttattaatttgattattatcgctgctgcgggatacatgtttggttggccacgtgctctttattccgccttgactatttttattaatgggcgagtaattgatgcggtttatacccaacaccagaagatgcaagtaatgattgttactcagcacccacagcatattatcgatggtattcaaaaccggatgcatagaggaattaccattttgcatgatgctgaaggtgcatacagtcatattgaaaagacagttttgattaccattattgatcgatatgatatgtatgatattcgccaaatcgtgcaaggagcagatccgtatgctttcatgagtgttagtgaagttgaaaaagtatatggtcgcttcaaggagcaagaaatcgtttaatggatagcccttaaaccttgatatataaggatttataaatgaaatttgaatcctaggggcacttggggagcaaaactattcaaaaagaagcagaaatgcttcttttttatttggagtggctttttgtaattatggctttattattggtctttgttaaaagtgattaaaaatgatattatttcgattgagggatgttgatatatcgtggatcatttagtgtattctccacgagtgtggaggtgatcctatcatcttgaagggcacgggagacaaggcagagtattctccacgtatgtggaggtgatcctactgttaacggtgatgactggtatccagttagcgtattctccacgagtgtggaggtgatcctactttgagctgtgtcaacgccacagccgtttagtattctccacacatgtggaggtgatccaagtcgttacatcagccaaaagatgaggcttaagtattctccacacatgtggaggctaaatagctgctctgaaaaatatgttctatagagtgactgtttttgtatattatttaaaaatattgttgatggtgcacggagattgcgttcacttatatagtgaaaagatgctaagaaatctaaaatagaatcgagatgaattggtaatctggtaatcgtaagaaggacttagctactaatcgttgtattcaattttgataacaaattaattaaagagcaaaaaatatgaagaattataaatttaataagtttatgtaaaaacagtgtcattaagttaggctattgattttggtgaaaaaacaattaaagcatcatttggctttagacggccagattgatgccctttttggcatatttttctaaatatcattcgcgttacacgtaaaagcgtgtgttgtatatagtgaaaggaggctaagagaatcggagctaagaggtgacaaatatgccgaaagcctataaaattaactcatactggcaaaaatactaaatggtcattaaagttctatcctaaaagagctttgttaactggtgttttgattgtgattgctatagcattatggaaagtgatttttaatggctaaatatacagaagtaaataaaaagtggaatgataaaaatgaggcccgtaagctttacattaataagaggtcaacgacgaaaaactttattttaaatcttgctatcgaagatgatttagaacagattgaaaaggatattgaagaaagacgcaataatttgtaaagaaataaaatgggatacatcaggtaataaaaagtgcatctcatttttatttgtatataatactagttaacttaaaaaagcaataaaattcaaataaaatggaggtatttcaaagaatgacagagaataataaacaagccaaaaccactgataccaaggcaaaacccaacaacgacacagcaatcttcgctggcggttgtttttggtgcatgaatccagcactttagcatctcctccttacgggtacatggctttgagcatatttaactaatacgcagaaatttgaaaaccgaaaaaaaccgaaaactgtttactatacagattaaaaatttaatgactaatttttttatattgatttatattagttacattagaattgttgatattattttcaatagaaaaattctgtagcttattagctaaatcctttttcacttttttagtaatatgcaggtaaattcttctggtaattctggaatcaccatgaccaacacgttgctggattacgtagagaggaacgcccatttcagctaatttagaaacgtgagtgtgtctaaatatgtgagtgacgagtttcttttttattttctgtcttttcatgatacttttaagtactttatttaacttagaattattaaaatagccctcactggttttccagttgtttgtaaaaataaaatcatttgcctttttgtcttcacagtgattttttgcaatagtaatggcttcaggaggtaaggtgacatctctatcaccagcataggttttagcgtttttggtttttatatgacgcttagatggatcaggttcatttctaatagtaattaaagatcctcttacgcgtgcaaaccaagtgccgtctttatcttgtaagatgttctttttttgaattgcggcagcttcaccacatctcataccagtaagatacatccattcaaagaactcttttaaatcaggtcgctttcgctcgtcacaatctttaagtatcctttctaattcattatcgtctaaatatttattttcaatttcttctcgtttttttaatgattcacttttccaactgattttaactttatcaattggattattagaaatataaccgtatttaatgcccatttcataaactacaccgatacatgatttataagagttgacagttgcatttgcatagggatgctcaccatatagcatattgtccaagtacttattgatgaattgtggggtaacattttttgcaattgtatctttaccccattcagaagatattttatttagagtggtttttttacgatagtaggtattgtaagctagctgtttttgagctatttccagatatttatcttttaattctgcaaaagtaatatcagtttctccactttcaagttcaattaatttagtacgaattcttttatcaagaataatttgagcctgttttcgggtttcacgattatttttgccgaatgtgcaactagtttcatgccatttattagttataggatttttatatgattctctgaaaacgtaatttccattcttcaattttctaataaacatgtttttgacctctatttctgctaaaatagagtacgtaaaaggcagtatgtcttttacatacttaatacttatttactgttcaatttttgttcagttcagtttaatgcatctagtatgattgccagatcaaagctaggtgctttccctcacttgttgccagacgggtgagggatttttttgtttcaggtttaacgtcactgtggacgattatctttgttctttccaaaaatctttgtttaaatactctgcacttaattccatttgatcacaaagataatttttttcatcaggatatagctctaagtattgattgatataaatgcctaatcctattctcaattcattgtaggctgttttatcatctgcaatatttaaagcttttgctaaagtgcctaatcgactttttcctttattatttctataatcagccggtgaaatttccattaatgtatgtataactttgttatatggtaactcgtgaattttggaaaaatgattataaatcctgccaccatgtgcagctgtatttctataatcgagatataaagacaacaatgatgtataacccttttcaaaatcaggtaattgttcaattaaagtgggctctaagcctgtcattattgaaattacatttcttttttgatcacctttgagtagctgataccaccaaatcaaattaccaaaatttaatttcttaacaataatccatgggggaatatttccatgtttatctctgtagtgtttaaatggttcagcatttgaatgagtaatacgtttaagaacatctagtaatacatcaataggataagcttcacgacctaatgagcgataatattgtttttttccagttcgataattcgaccgttttagatagctatcttgcaactcagtatatttttcagatattgtgtatgcaactgcttgtcttaaattagattcaaatatttcaagagcagacattacctgagttcttaaatttctatctaaagtaaataacgcaaatatatgctcaaatgtaacattaggcttgaagacatcagcttcgttgtcttcagaaccaactaaaaaataatctttataaccattaataatttcataataaccatatctacgaagattatttttagcggcttcttcattttgaattagtaatccacgactttttaatatacttatttgttgatcaatagttttaaaaggctttgggttcataaaaacacctcaaacacaaaagggacatgtaacaatacatgtcccttttggtctgatcgcatagcgatcacttaacttgattaactttatgttaacctatgtgacttgttgtgtcaagagacattactttgtatcatttagtatcagatagtgtcatttggtaatatttcgtttaataaggagtgccactttctgcttggtgtaattgatccattgcatatttataagcttcatcgcgtaatgcgccagagtaggtattagccttactcaacttatcactgattgaaatattaggattattaaagtaagctacctctgttgctgataaagttcttttatcatatttttcaggagtagtagcaatctttaattttgaatgatgcttagctgcagtctttgcctttttaattgccttgcggtatttcttagcattgcgtttgttatacattacaaaccacttggtgttgttgggactaactttactcaaccattcatgccaatgatattgtttagttacattttcaggaatagcaaaatctttaggaatagggttaaatgtccatttttgatgcccatttactccatgatagatttttacaactctacctttttttaaggtttttgtagttaaaattactccattgtctgataagctatcgttgtttgcaattagattgaatttagtattcttagttacaattacttttttaggtgagagccaatatacaaagtgcttgggaagttttgcagcttctgcagtttgaggtgtaattggacttgtagactgttttgtatttgaacatattccaattgcacccataagagcaactgatgcaagaccagcgataatagattttttcaatttcttaacctccaaaagtcaggcttaacgtcactgtggacgataatgtataatattgctaggtgattaaaatgttaaaagatattatttatttcacaaaagaagacggtcaaaacaagctactaatggtatcatccattactgaaggagatgctatggcattagaacattttgacaaagctgattatgaggcttgtactaaaatattaggacataaaccccataatatttataaatttattgatggtatagagtttaaagtcctaagatcttggataaagccttagttgctatactggataatattgtcattgatacactacttaacttcgaagcagcaatttttgtttgatgccaaaccttattatctcgaattgtgtctataaactggcaaccgttccaagttaatccgccacatgaaaacatagcaagtgaattgtaagtgtaagtaggtttaccttggataaagccagcatctagtaattgaagcagggtatatttaatatcatccgcactgtaatgatctgacagtacatcagcagataaaaattgctgaagagagataaacctaccaggtctatgttcttgttcaataaataaaagaacatctcttacacaatcatgatttaaccgcacaattaaaactccttacaaatcataactaactttaataactttgcctaagatacgaccaggattttcttcgttaagaagaataggatcgtattttttattttctggcatcagcattacttgtttaccaacgtgtttaatacgctttaaagtggcttctgtgttgtcgtcaactaagactgcagctatctcatcatcttcgacagtaggttgttcacgtactataactgtagctccatcgggaattttgggctccatggaatcaccttgacatcttaaaacaaaaagtgtgccatcaggtttttcattaaataattcagttgtataaccctcaatgttttgttcagctaagataggtgtgccacaggcaattgtaccaatgatagggatgcgaacggcgtgcatccctgattgagagagtggcttcatgtttgtaggttgtttattaactttaagaatatcaggtgattcaatattgaataatttagccattttctcaatatagcccattctaggtattcttgtaccacgttcccaattataaactgcctgttcagatacatttaatttatctgctaattgagcttgggttaaagaatttttagatctataaaattttatattttcagatatagcactcattttctcacctctttgttattagtataacagttttgttagagaaaataacataaagttaggaaaaagttaggtttttattgaccataacaaaatgttagggtaatatataagacgtaaggaggtggtaaataaatgagtagcaatacaaaaatcactttaaaagctgctagagttaatgcaggattaagtcaaaatgaagctgctaaaagcttgagctcatacttcggtatgcccatttctaggcaaagagtggcttcttttgaaagcaatcctgataaagtgccgcctgcttgggcagaaggattctcaaagatttataacatttctttaggtgatatttcttttacccatagttaaacgttatgttagatttagtaagggggcgatgatatgaaactcacgcttgaaggctcaccaaaggagctgaaggaatttcttagcccgaatgtggatgcgagaaagttgtggaaacaaataaagacatcagcattacagccgatgtctgaaaaacaatattcaaaatggattaaaagttttgctttttcgtccacttcaaaatctcgggataaagagatgcataagcatctaaaacatgaggcttagcatgaattttgacaccataagcttctaaatcatcccagtgattttgaaggattaagagtgtcaaatcatgtgctctttgttcattatcaatcataaaattcaccttcttattcgagtatgaattcattatatgacaaagaaggtgatgaaataaaaatgtggaacgtagtagaaaagatcttaaaagaaagatcacttaccatttatcgtttatcgaaaatgacaggtatttcagataacacacttagaaattatcgaactaagtagtctgatcctagttttactaatgcttgcaagattgctgatgcattaaaggtaagtctagatgatttaagagagaagtaaggaggcgacaaaatgaatattagagaggcttgtttaatggcaaaaaaagaaggtcgtggcataactcgtaaaagttatggcccagaccatcaatatatttgccaaccaatacaacagcttgcgttttaattattccttttgcagaaggacattttaaaaccaaacgctggaatccaaacttggatgatttggttgcaactgattggtatgtatatggctaaaaaagattagttatacagtctgttttctaaagcaaaattgatttgttcagaatctaaaacaactttgggatgaaattccataatgttttgagcgttatcaatcttaaacttaaatctcattttgtcagaaattatgtttgtagatctgagattctgaaagcttattacaaaggttttagacgatctaggtggaatatttaatggagtacagtcactaaagacaaatactttatcattattaaatctagtctgtgatattagttttactggaaaccaagatgattcaacagtttcatcttcatttgtgaaataaatattagtaatcgtcgatggtctagaagacatatttgaaactaacaagcagatatttaattgctgacctagctcataggtccaacgtaaatatacacgtgtctttatatgtttctcgtaataagtattaattgctgaataaagtgagagtgcaaaagctaaagtagctattgcaattgaaacaatttcgtaaggagtcattgagatacctcatggataaaaattacataattgcgattattggagcggtattagccattatagcaataattttagccttaatttagtcattattaaagtcctgaaaggaggtgaaaaatatgtccgataaagagttattagaaaagatgaaaaaatatatcggccgcaagttggatcaggacagtgatcctaacgccatgaaagctatcatttctgaatacatgcacctgaaaggagatgattatagatgatggccaatggctggaaaacaccaaaacaaatccaagaagactacaatctggcagataaaacgtgggcaacttggagaaaacagtgtgaagcatcaccttatgcggatgcaatcgtgagagtgtcgacaagatcgacatttatcattgaaccgttgtggcaaaagtttttgatctggcagtcaaaaaactttgaagaaaaacatttagatccgcacttgcgcgatctgaaagtattaaaggagaactgaactatgacaaaaatgaaaacggtaattgaagtaggtattgtaattggctatgccgctttattcgctttagcgatcattggtttgtactgcaaccctgacgttttatcagttggaatgtaggaggctgcagcatgtcaaacgaaacatttaataatctgttgaagaacagcaatgctttatttgatcgtgataataaaatttggtcaaaagaatcacttttgaccaaaatacaaaaaagcgtgttgcctgaaatcaggtaacacgcacaccaaaaagaatctacaaagattatatcacaaaaggaatcttatttaagaggtaacaccatgccaaaattaaaaagagtatatgacaagagttacatggttattagcaatcatgtttttgaagatcccaatttaacactaaaagcgaaagggttattcggctacttatggtcgagacctgatgactggaacttctttatcaccgaattggttagacactttaagggtggtagagatcaggctatgagcgctttagatgagcttgaaaaagcaggctacttgcttagaagtcgtgttcgaaatgaacttggccaacttactaataaaagtacctggttgctatctgacacacctaaaaagacttggatcgagcaaaagagaaaatctgcagataagaaaaagatagtcgttaaaaagcaggttcaaaaatctgcttctaagaaacctgtggataagtctactaagcctaagtcggattttcctacacaggcttttcctacgttggataatccgacactactaaatactgacttaactaaatactcatataacaaaatacttaataattttatttatacttcttcttcttcctcctctactacacaaaaccaagtaaatcatgaagatgaagaagaaaagataactcaaacaatgtctaaattatttgaatcaataagattctatgacaaattttacggcacacataatcgaccaaatcttagacaattaagacaaattaggacaagagttgctcagcttcaagaatcaaatagagatgaactatgcaaggcatacgatgaacgaatccgaaatctgtatgttaatagtccaattggctatttgattactatgcttaatcaagaactaaaagatcaagaaatatggaataaggaggcagctaccgatgcagaaaattaatcacgaagacgaaaaaattagtttagctagaaaaaagattttagttttcttacctgctggaattacaactacaccagcttggctgtttgctaaatttacaacatcatccttagctagacgtggaatcagaagagttagtcctgggcttagaacctttaatccagatgaccaagaaaaacgtggccaagttgaatatgtcattcagcaaaataagagtgacagcgttaaaagagttaatgctgatacgccaattagttatcaaggatggggcagatggtcataaatgggcaagaaagaaaaagcaacaattaagaaaatattggactcattacagcaagcagatgatatgacaatggctttagattttattagatctgcaatattacttgtttgtactgaaagtgcaactgcaaatgatggtcatgttgtgactgataaagaaaagaagatagtcataggccgaatgcttatgaaagctttagctctttttaatgatcatgaaatgcctgaattacttcaatcttttaatgctgatgaagaagactttagtcatgatacacacggtaaattacttttaaaaataattgatgctgaattggatcaaatgtgaaaggtagcataaaaatggcaagtaatcgacttgaagatttaaataatatgctttttaaccaactagttaggttagacaaagatgatattagtgatgaagaaatgaacaaggaaattaatcgtagtaaagctatgaatggaatagcccatacgattgtagataatgcacgcgttgtattagatgcagctaaattcatggataaccgtgaagatgctaattctaaattacctcatatgattggagttgatgcacctgatgacaataagaaggtctgatggcacctttgttaaaggtagcatcccttggaataaggggttacatattgatttaagtaatggcaaaggtcagtttaaaaaaggaactattccacctcagcatcatgaagttggctatattgcacatcataaagatggctattcctttatcaaagtagccgaacccaaaaaatggcaattatatcaaaggtatgtatgggaaaaagctcatcgtaccaagttatctaaagatcaaattgttattttcttagatggcaataaagaaaattttgacccagataatttagcagtggttactcgaaaagaattaatgatattaaatcatgaaaaaatgctgactgcagataaagatttatctaaaacgggagttttagtagcaaagctaaagatgaaaattaaggagaaagaaaatggctaaaaagattgtatggcatggaacatttaagaattttaaagcagatgctaagggtaatgtgactcttgctttttcaggaacaggtaacaatatcaattggcaatggctgaatgagtttcgtcaaaatggttctgttcaattagttattactagtgatcaaacagaactagatttagatgataattctgatgattcaaagcaagtggaattatttgatgaaaaaggggagcctaagaatgaatcaaagtgatttcgttagattaatcagtctctacagggatgcccatgttagcttttcttatgatcgtgtaaaaaacactttgcagttgattactatcagttttgaagatgagtgtgatgaaaattactgtgaaatcatagcagactggcacactcggagcacaacaattttgcgttcttcagcattagagcctgatgagttgctgcaggtttcttacgttatgaaattgctcgttgactttttatataaaggagtagttgatgatggatcaaaagaaatggaataatcgaactccttttataccaggtaaatcttatatacctgcaaagttgtttgcaaagtattctgcagcagatttattaaagtatggtttacgcaaatggcctgatggaactgcagttgaaattaatgctggaatttttagccatgcaagattgctagtcccaatgaagcagaaaataacttttcaaggtccaaattggtatatagatgtagaagggtatacccatgaagattaaaagtatcaaaattaatttaaataaagagcgactagacacagttatgaaagctatgcgtgcgatcgaacatgaaaataaagccgaattctataaagcttgcgatcaaattgtagcagatacaggaactagtaaagacgacgttgtttttcatattttatgttctacgtataaaaatgcaatttcaatgttaatggcaaaaggttaggtgagttaagtgactgaagaattactaaaaattcaagttaagaatgatcagcaattggtatccgcgcgtgatttacatcgtggacttggattaacaactagatttagtaaatgggttgagcaaaattttaaagattttgaactaggtgaagattatacaagcgtaactgcagttacggtagttggaaatggtggtcacaagccgatccaagattatgccttaacaatcgatatggccaaacaactatgcttaatgagtcataccgataaaggaagagaatatcgtaaatatctaattgaaattgaaagaaagtggaatgatccacaagaaattgttagacgtggttatgcaattcttcagaatgagaatactcaattaaagattgagaatcatcaaatgaagcctaaagcattatttgcagatgccgtaacagcttctaatcgaaccattctaatcaatgatcttgctaaaatcttaaagcaaaatggtgtgcagattggtggtgttcgtttatatcgctggctaagagagcacggttacttaattaagagacgcggatcagattataactctccaacgcaaaaatccatggaacgaggtctctttcgtgttaaagagtctgtaattactcattcagatggtcatacgactattagcaagacttctaaggtaactggcaaaggtcaaatctatttcgttaataagtttttgaatagtgataatcctgatacggcacaatttagggaggaaaaataatgaaaccttgtgatttttgtaatttcaaaaatagagatcgtcaaacatacgtaatttactatcgaaagaaaaatgatcctacacatcagagaaattttttgttttgctatcttaacaataaaggtgaactagaaattgacggtaaagatattgaaggacatactgatgaaccagttaatttttgccctaattgcaggagagatttaaatgatgaagattaagtattacttcgaatcagcatggcactggtggtggtctatttggaaatgatgctttggatagttaatcacttaaatgacattatctttgtcgtgtggaccgtgttgctggctatgaacatgtattctaatcataagaatgaaaagtccaaccaggagcttttagatgagattcataatagcaatgatttaaacgacaaattgcttaacacggttaaggaatacatgcaaacaacagataaaaaagcaacaactcaagacaacattttgtgggacagtatcattattttggctaaaagaattcatgatttggaggataactactttgttaaataagaaaaaatggatttcatttgataaaaatggcaaaagcatttatgctgattcaattgttcatgatgaagaagcagatgaatatttcatccctactgaaaagaatggtctttatggggatgaattccttggggatttttatttattagagcctaagaaacttacagtaattagttcccatacttcaatggatgatctaaaaaggatgatgaaaaaagataaaacctcaggtgcagtttacaatgttggaggtaactttaatgtctaatccagtggccgatggctggaaaaattatttgcactattttgcaaaactaggtagggaagttgatcaaatgaaagaaaatattgatattcaagttggaaccaaaaaatcaaaagagacatggaataaaacatataaatcagttttcttagcaaacaatggctggaaattttatgaactttcaggaattagattttgccagtatcttgctacagttcaaactaaacatggtgaattggttgttcatgatggtgattcaattacatatctaggccataacttgtgggatgtacgtaaaggataataatcatgaagattaatattgatgatttagatatttatcaaaagacctggaactacgggatgcagaagattgctgcaagtattattgctgcagcatataacttgaattctggcgatgttccaattacaaaaacggattatcatcatcttgtatttaaaggatttaatccaatggatatgaatgagagttttgaaattcagttgaagatagttcctaaaataagctttaagcatagtagtcatgaatagctaatcacaaacagttttagggatgcatgaattaatgaggtaggttaagcaaaatgtattatttaaaagaatttgagcattgggatcgtaaaaagactgcagctaatgttcaacagtttcttactaatgattttcctataattatgagtagagctgataaacagattacagatattactagcccacaattaaatagcatccctagtcacactaatggtaattcacaagagaaaaaggttttagatcatattaactatgttgctgtgtttttatgtgttgctgatacatatgctcatatgtctaatgatggtaggaagtatagagagatcattaaattattatgtctttacaagttagatagaaatactgtttctaacagattgggaatagatacttcaactttggataaaagaaaagttggtgctctgtgtgaatttgctaatcgatttgaagttcagaaaaagaggcatgaacaccaagtagattggattcctaattttagagttccaaaataaatacaaatctgatacaagattcatacaactttcgtacaacatttatccaactttgatacaagatttatacaacattcatctaacatttatccgaacataatgagttattatgatattgtgaattaattgagagaaattgattcgcactcttgatacggtaagtcatgtacttaacctccttttgtgattttaaatagcaggcttagtaaattactattggctgctattattatgagagtttagtctaataggtaagacgtcaaacattgcctgaagatgcaggttcaaatcctgtaactcccttttgaatatttattgtagtaatgaattttaatttataagtttgttttatgattgacatcatggtaaggtatatcgattaataaatattcagtacatatttatgtaacggaagcatcttagtaatactgagtgtgtaggttcaattcctacaatatgtatagatggctttaagtcatcaggatcgaacgtgtcaaacggtcaatgaagaagcaattgaggtttcagttgcttctttttattttcacaataaggagtatgtaaaatgccacgagtaaggcgatgcaagtatctaggctgtcatgcatttgctgttatgcctaatcactattgtcaaacacatattagtcatgaacaggaatatcttgacagaagaaataaatatcatgaatctaaacaaacacgttggaaatataatcatgtaacacgttatcgtaattcaactaaggcaaagcaaaataagttttatcatacccgtgtttggaagaacctcagaaaggtagttctccaaagagattaccacctctgtagatattgccttaagggaactggaactatagtagatcacattgttccagttgaatttgatattaatcaaattgataacgttaataatttagttacatgctgtcgtgactgtcacgcgaagaagacacggtgggaacaaaaatattatgggactggtttgcataatcaaattaaacccgttcctgagattacggacattaaaacaatttctaaattaatgaatgttccagacgggtatgagaagcccttagagcaatttaatttttgaagtccatagtttatcaaaacataattttttaatgccccgccccatgttttgcttcttagggagccgcaacagtgtcgttttcttgtgatgcgcaaacatttttgaaactttttgataggggggtcaaatttggcgaaagttgatttatcaaggccgaaagtgcctacacaagctccaaaatggcttgataagtacggaaaacttttatggccaaagatggccaactatcttaataaaaatcctaaagtcctgcgtgcagatgaatatttattgcagcagtattgttcagcatatgatgtctatcgtagagctcaacaatctcttaaagatgatggactgcagcagaaaatgtttaagacggtagttaaccctgtgactggtgaggtaattaatcgagattttgccggctatagaaaaaatccggcttatcagatgatgtctgactcattatcaaagttaaattcaattggtcgtgagcttggattgagtcctaaagcacgatcagaaatgatagagtacaaggcaccagatgagaagaaacaatcaattacagattcaatgaaggagttctttaaaaaatgaattggattaataattatgcacaattgaaatattttgaggagatacttggtttaataattggtggaattgtatttatagtgattttcattctatggctggttatgtggtttaaggattatagaaaatggaaaagataataggaataatttttatcataattgctttatttgcactaattcaagaaggaaaagattgatgctttatttcaaatttaaagatgacaaatggtttgaagctaaatcaagaagctttgcttatatggcttataatttaagctatgttagttctcggctactacttatgagttttactaaagatgaaactcaagcaatgatacaaatattttctaaaaataactagcaaaacattagcttattaatatggaggtggtaaatgtaatgaaaattgatttaacacaaacgcatgatgtacaaggtgcctttgaagcagttaattggacggacattgccaccaaatataccgatcgtggtactaaatactgtttcgctgttttacatggaccagtaatggcaccatataaaattaaattagcttgttttcggcatttaagagatttgcaacgtcaggatcaacgtgattttccttatcattatgacattgcggagctggatcgctttttgaagtttgctgctatcgttcctgaagctaaatcaaataaacctgtagccttaaccgactcacaggtttttattttttctcaattagttgcgtggaaagataaaaacaatcaaaaacgatatactaggggaattttgtcaatggctcggcacaatggaaaatcatttcttatgggtgtctatatggcttatacatttttgattgcatctattggattaaagaatcaagattacctaatttcatcaatcaattttaagcaaacatctaaattaatgggttatgttaagaccacactgagtcacattatccaaattgagccatttaagtcttatgccaaagaatgtggtattgatccaaagagtttaagttcacaagcatctcaagtcagaatgagaaattctaataatacaattcatgctattacttataattctggaagttatgatggcttccacttcactttggccataggagatgaatttggtaaagttgctgacacccaaggagtatcagatattacgactggtcaaaatggccaagacaatcatcaatttattcaaatttcaacagcgtatcctgatcctagtgttccttttcatagggatgaagttaaggctgttgaagcaatggaaagagattgggatcgaacaagtggtgataactatctttgcttagtgtgggagcaagatagtaaagaaaaattattcgaacctgataaatgggttaaatcgaatccgctcatttactgtaaaccgcaaatgaaaaaagatttgatcactgatcgtggaaatgctttgttaactgattcagttgataaatttcaaaataaatctctaaacatttggcttgagcaatctagggatagttttcttaaattagatgatgttgagagcgcaattctagaggactttacaatagataatcgtgaggtattcatcggatttgactactcaatgttctctgataacactgcaattagttttgcatttccatatggtgatggaaaatttcattttatgcagcattcatttattccatttcaaaaagcaggttcgattgaagtaaaagaaaatcaggatggactaccatatcgtgagttggccaaaaaaggatattgtgatattacagaacatccagatggcattatcaatcctgaacaagtttataaatggctgcttcaattcgtagaagaacatcatctacaagtggttttctttggctatgatcgctggggatcattccaggttaaacaaatagtggagtcattaaacgtaaatactaattggaatattatggatattcagcaaactacactgcagttggccaacccaacaaaatttttagaagagcaatttattactcataaagctacgataaatgatgatcctatcatgaaaaaggcattgctgaatgctgtagttaaagaagataaagttggtattcaaatagataagatgaaagcaactctaaaaattgatgtggtcgatgctttaattgatgccttatttcaagggatgtattattacgatgaaaatgctgatattaattctaaggaaacggaagtagatagaatgactgaacaacaggttcttgactggtttaaaaatccaaattcgggactaggagatgattaaactgacaaaaaaagttttaaaaaaattatggttatacagtgatatcattgcttggattttggcaatgattttcttttgtattgcattttttactatcaataatacatttggacttttttcaataggaattagtttggttgttttaggctatgtttttgaattcattggcagaagtaaggggaatagcagtaaaggaggtgaataaaaatgccaatttttaatcaagctcctaccaataaatctgctatttctctgaacgatgatcctggtatttggtctgcattaaataagactgaagatgagtatgtatctgcagataatgctctggaatactctgatatttattccttgttgtcacagttatctggagacttagtattagtaaaatataaggctgataaatctagagcacagtcattaattgataatccaactggtacaaccaatggagccgcattttggcaatcaatgtttatgcagttgcttttagatggaaatgcttatgcgtatcgctggcgaaatattaacggtgttgacttgcgttgggagtttttacggccatcacaagtacaaccatatttattaagcgatggatcaggtatgtattacaacgtaagttttgatgaacctgaaattggaactaagatgtatattccacaatcagatatgattcatattcgattagcatctaagaatggtggcttgactggtgtatctccactgaagtcattaaagcctgaaactcaattaaaatcagcatcaaataaaatggccttaagagctttaaagcaatcagttatggttaatggtgtgctaaagattaagcatggtgggttgctagattgggctacacgtgcttcacgttctcgtaaggctaaagcgcaaattgataactctaatggtggtccatttgttatcgatgatttggaagactatcagcccttagaagttaaatctaatattgctaatcttttaaaacaagtagattggactggttctcagattgccaaagtatatggtgttccagattcatttattaatggccaaggtgaccaacagagttcaattgcacaaattagcaatcagtatgtaaaagctttaaatcgttatgtgactccgattgtaagtgagttaaacaacaagcttaatattcatattgataaagatttacgaccggcaattgatgttttaggcgataattttgctactactatctctagtttaaaaaaggatggtacattagcaggcaatcaagctcgatacgttttgcagaaatcaggatttttgccggatgatcttcctcagccagatttaactgcagaaatgacagctaaaggaggtgatgataatggaaacactggaagtcaagggaataatcgtacctaatgatttgagcgatgtctatgattggatgggctatgattcagtaagtcctagtagtattagggatgctttgaatcaagctagcggtcaagatattgtggtagagattaattctcgtggtggctatgtggatgcaggatcagagatttatactgagttgaaaaaatatcaaggcaatattgatattcaaattgttggttatgcctgttctgctgcaagttggattgctttagccggcgacacagttgaaatgtctcctacggctcaacttatgattcatagagcatcaggaggggccgatggtaacgttgatgatcttgctagtgccatgcaagggttagatcaaatggatcaagccttagttgatttgtatgccaaacggactggtaaatcagcccaggaagtatatcaactaatggctaaagagtcctggatgaatgctaaaaccgcagtagcaaatggttttgttgattcgataatgtttgaagatgaacaaatgccagctgtagtaaatgctgatggtgtccctattttaagcaaccaagtaattaataaaattaagaacttgattaaagaacctaaactacaaaataaaaataagccaaagagacaagttaagaatgaaaacttgtctctcttattatggagttaacaagaaagaagataagaaatgaacggaaaaacaattaatcagttgcatgatgactggatttctgctggtcaaaaagtaactgatcttttaaacaagaaaattggcttaaatgaaaagtataagtcttcatataattctatgtctgatgaagaaaaagctaatttccggaaggaaatggagcaagctaagcaagattatgatgctgcagttcaagctcgtgattttgctaaaggtacgtttgaagatgctcaagaagctatgaagactatgcctaagccaactaatggtgtacctgtagaaaaacataattctaagagcaactttgccgatgggtttagagatatgcttcgtcatcctatgaaatacatggaaaacatcgctactagtgacccgaatgaacctaacactttaggtttagctattcctgatgatcaacaaactaaaattaatactttagaacgtcaatatgattctttaaaagatttaattactgttgaaaatgttggaactgatcatggttcaagagatttggaaaagctgtcagaaattaagccaatgccacgtcttgaccaatttgatgatcaatctgatggtacaaagaaaaagaattataacaagagccaaaatactgatattcctgaaggggattatccatctattaagaaaattaattatgtaattggtgactatggtgccattttctatgcaagtaatgatttacttaatgattctgatgctaacgttgaagattacttaaatagacacattgcattaaagaatacagttacatataatcatgagattattagcagattgcctcaatcccaaaacaaagctactttaaagactttggatgatattagtgatgctgttatggacttagatatggcactttgggatggctctgtcttattgattaataaatctgcatttaaggctttaaaagaagttcgtttagcagatggtcatcatgcacttacaactgatgcaagaactaatatcacaacgtttaagttagatgaatcaacgtatgcagtagttcgcgtagttgaagatagatggttacctgataataagacagctgcaggcaagttccaaagtcatccgttttactatggtaattttaaagaatttttacacctctttgatcgtcaacaaccacaattacttacttcaaatattgctgcacatgcatttgaaagaaatcaaactgctattagatcattacttagaatggatcttcaagtgtgggatgatgaagcaattatttcaggttcatttgataagattgctagtcaacctctcattttttcatctgtaggggtaccaagtagcactgatgctgctgatgatgcgaataagaagagcggacaataaatagaaggtgatctaaatggccaaagtacaattttatttgaccattaaagatggtcttgaagatcttctaggttatatagatgatgatttaactgaagaaatgaagacccgcatgattacttgcttaaatgcagctgaaagctttgttcaaggttccgttggacctgatgatggtaatttctatcaaaaaaatggcgtaaaaaatctttatactgttgcttgtaattcctatgctgctacgttgtttacctatgcttcaacaatatctgtaagaagagtaaataatgttgatgatgtttgtcgcagcatcattggtcaattacgtggtaaatatgatgctaaagacgatgaggtgaataatgatggtacggaacatcaatccgacatctctaacggtgttaattaaattcggtaaacctgaaatgaaattaaatgaaggtactggaaacactgaaaatactggtattaaagtaaaatttagaacacgcggtagaagatattctttgccaattactcagcaatttgaacattctgatgttaactggcggcaaacttttgtttatgtagtacatcatcgaagagattggtccgaagttacatatgcagagatcaatggacagatgtatcaagttactggaattaatcctgactcagctaatttgcctaatagttatgatcagataacacttactcgaattgtagaaggtgaagagagtgatggataattttgaaaagcaacttaatcagtttatggaagaaataaaaaaacaagtacccaataagaaacaaaaacaggtagcaactttagctggtgcaaaagtttgggctgatagtttatctcatgaagctaagcaaaaacactattctaatcataaggataaagtttatggccatatggctgataatgttaaggtgtcaggcaaaaacatagatggtatggttgatggttcagcaacggtaggctgggataaaagaatacatgcaatgaatgccctgtatactaatgatggaactgtaaaaatgcgtggtgatcattgggttgatgaagctcgaaaaagctttaatcctgaggtgtttaaggctgagatagctgcccttaaggagatggaaaaatgatttcaccacctataacagaagtttataaattaatcgctaaacaagattatgattggttagatttattagcatcaggtaataaagcgccagatgcgacaggaaaatatacttcaattcttattcagaatgctgatgaaacacctgatggcatcaggaataatcgttcaactttgattcgatttagaattgaaatacaaattttctttaaaaaaggttttagtcaaaatatttatgaaaaaagacaagtcatagaagatttgcttcaggatgatggctggattctttcagatgaaagacctccggtaccagatcccaaaacacagcaaacttttatgactatttattttataaaaaattataggagaaaataatgagtgaaaaattaggtagtgcagctcatggtattgatttaactattttgagcggtatttcagaacaagatggtcaagttgttaaaggcgataatggtttaactcaagatggtccttatgccgttgatgcaggtattgaaggtgcaactcaagttgaatatcaaactttggaagcagccggtacagatcaatttgctaacaacaagcgtaaacgtactactagaccaagccaaaacccaacagcaacagtaacttacttagacattgattgggatgttttgaacaaggtagttggttatgaagaagatgaaactggtggtgcaactcttgatcaagatcacaaaccacatatttcattgttaacgcgtgaaccactattggacggtaatttcttatatgaagcatttgctaatgctacagcaacttaccaaacttctactcacgctactgataatacagaagaacaagatgccaacgttcaattgagtttaaaggcatatgaaccaatcgcagatgttttcaagcttaagagtggtaagaagatgccttataagaagtggaattcaggttctaagaagttcgatgaagctaagatgcttcaagaagtattccctggaactaccgcaaaaacagtagatgacattcttaaagcaagcacaattaagacctcaagtgcaggcggtaatccaacaccaggtaattcaggtggttctactagtggtacaaacacaggttcaggaactgattcagaaaagaagacagaaaatagtcactaattaaaacgctgggtgggagtggaaggtaaatcgtttttagtcagcaaatcaatttaattattttttgaaaggaaaatactatgccaattcaaattgatacaacaccattttcaagcattattaacaaaaagactattggagttgaaccaacaggagccatctttgataaggctcaagatattcaaattgagttaatggatggagacattaagcgtaaggaaaccttcttggaatttaagaagcgtgatcgtcaaactgctaaagacgtaaaagaatttattaagaagacattgtctttaacaactaagcaatgggataagataaatgaaactattgataatgatgtactaatgaaatttggcatgtatatggctttagctcttcaaggcgctgaatacgattcttatcaagactatgttgattttattaatcaacaagctgaagaggatgctgatacagacccaaaatcctccaatacaaacgaagaaaattagtttttgagttaaaaaatagaagattagataagaagcgtttgcgtaaggaaatgttcttgaagcatggaatagctcctgatttttggaagaaaaccaatgtctttgaattgatggatattcttaatgttccagataaaaatccacaactaccagttgcgcatgatggtggcttttacgataacgctgattgggctgaataagccctttttattttgcgctggaaaggaggaaaaatgagaattcaaaacgtaatggccacgagtatcaaaattgatactgtgagtgctactcagtcattgcgttctatgaacacagcattaaaggcttcaacaaatgcatggaaagccgaagaagttcaagctaaaagtgttggtaactaccttaaggcatctcaagcaaggtatgaaggcctaggacgttcaattgatcaagctaaagaaaagatcaaattaattcaagaacgacaaaaagctcttgatcttacaactgaagatggccgaaatagttataaccgctatgctaagcaacttggaataaccgttaagcagttgagttcaatgacagctcaacaagaacgtgctaaatcagctatgcagtatcaaacttctggtttagctagccttcaatcaaggtatcgatcacttaatgaagttaatagttcatatgtgaagcgattagaagcagaaggtaaaaagtatgaagctgcaaagacaaggttaactagttataaatcagctgtcgaaaatttaactaagcaacaaaaaattcaagagagtgaactttcaagaattgctagtgaatctggaaaagctagttcggcttatcatgctcaagaagttaaagttaatcaaactgctacaagcattagtaaattaaattctaaagttaaatctgctcaatctgaagtaaataaacttaatccaaatggctttaataagattgctaatggtgccaaacatgtaactaatgcagctgataagatgaagtccagcttaaaaaatacgtgggaacacgttaagtctggtgctactgctgcagctgctggtattggagctgtgggagctgctgcaattagtggagcaaaaaaggctggtaacttagagcaatcctataaggaaatcactaacttagccgttactggcggtgaaaaacaaaaggaagcaattaaaaatgtttctgaaatgcaacgccaaggccgagctatgtcaatccagtatggtaagtctcaacaagatattgctgattcctatgaggaattagttaaaagaggatataccactaagcaagcattaggtgctatgcgaaccgaattacaggctagtgttgcatcaggtgatgactttaaagatgttgttgctgtatcaagtacaactcttgagtcatttgggatgcgtgctaagaccacggctcaaatgacttataacaccaagcgtgcagtaaatgagttagcctatgctgctgatatgacttctaccggtttcaaagacttagggtatgggatgtcctatgttggatcatccgctcaccaagccggttttggtttatctcaaactgcagctgctatgggtattcttagcaataacggtttggaagcatctaaagctggtactggattaaatgaagttatcaaccgcttatctactgctactggtaatttgctcaaaggtgacaagaagaatgctcttgcaaaattaggtattaagcctaaagaaattactacttctactggtaaattaaaagatctttcaactgtatttggtgttttaaataaacacatgcagggaatgtcaaaggtccaaaagatcaacatcatgaaatccctatttgggatgaccggagaacaagcaggtttaatcttaactaagtacaacaaacaacttggtaccttatctaagcaaactctcaaagctggtaaagatggagattatgttgctaagttagctaagaaaaactctgaaactgccaaaatgcagatggcacgtcttaagatgactggcgaagccttcagcatgactcttggggcaaaaatgttaccagcaattaatagagctggtgatagtcttgtaatctttcttactaaaacaaaagatggtaagaaattaacacaagattttgctaatggtgttggtgcagttgctaatgggttggttgaccttattaaatgggctactactcataaaaccgaagttaagtggatctttggtggacttttaacaggatattcagttgttaaaggcgctcaatttttacagtttttaaataaaactcggttggccatgtctgaacttggggttttaagtaaatcaaagactgcaattaaaggcgtgggaacagcatttaagtttactgccaaattagcaaaagctggtggtaaagggatcctaacggctggaaaagcatttggaaaatcctttatccaaagtgctaaaggagctggaagtgctattaaatctgttggttccattttaggtaagggagccaaaagagttggtagtgatctagttgattctggaaaattccttggtaagcaattagtaaagggattcaaaggctcggttaagctaggaaaatcaattggatcatctctagttaatggtgctaaatccttagttacaaaatctgtttctcttggcaaaaaaataggttcagctatttcaaagggtgcaaaatcaacttttaaatttagtgaaagcttatttgaaaaaggtaatagtgcaggtaaactaactgggcttctgcaatctgctcattctgctggtggttttaagaatttaactacagctggcaaagtcggaaccggtttagccggagctggtgttgctgttgataccgctacttcaattgttaaagcaattaaagataaagttggtagtcgtaagcagtatgaagatgtcggcacttctgctggtaaaggcatcggtggagcgattggactatggtttggtggtccagccggtgcagctgttggagctactattggtgccaaggttggtaaatggggcggtgacgctgtcaagtcatttaccaacggttggaaatccaagaaaccacctaaaaacttctggagtttagaaaatttaggttggagcacaaaagacactttcagcaaaattggtaagtgggggcaaggagtaggtcaaaagtttggccaaggtcttaataaaggtaaatcctttgctaagaagaacgccaaagagcttgccttaactgctgtttcaccaatgcttggaattccagcgcttctttataagaacaatccaaagttcagaaaatgggctaatggtgttggtaaaagcgtcaaaaagggatttaattccgtaaagaagaatgtaggtaatttcaataaatcagtttctaaaaatgttggtaattttactaaatcagttggtaaaaagtatcggcaattcacttcttctgcatctaagactttcaagaaacattgggatcagatatataaacatagttctaagggaaccaagcagatcatgcggtctactgagaagtttggtaagaactatgtaaagattaataagaagtatggtgatgaaactagaaaaaactttggatcctttagtaaacgattaaagaaaaatcatggtgatttattcaagacaattggtcagacaacaaaaactcaattaaatattgagaaaaagcgttggtctgctagttggaaaaatattagatcctttactggtggcgtttggaaaggccttaccaaaaatgccggtgatatgtataaatcacttaattccaaaactcatggtggcctaggtaaagtacttactaaatttaaagcatttggcaaaagtgttggtgacttctggaataatctttggaagggagtcagggatacttttgatagaaccattaagggattaaaggatgctgcaggcaatgtaggtaagttctttacaggcaaattaaaagtaggaaatattcaccttgctgatggtaccgattggaagaagaagtatggctatcctgcaattgttaatgatggttcagattctccagaaaccaataatcgtgaaggattaattgataccgatggaactttaaagatattccctaatgttcgaaatctaaagtggtggatgttacctggtcaacacgttgttaatgctcatgatttagcaacaatgtttggtagtggtgttcacttagcttctggaacacttgattttgatttgctgaaaaattacaagatcggggatgtaaaaactccaaatctattaagcaaattagtaaagatcaattctcaaagtctaaagctaaaattaaaaacttatgctgaggataaagaacgtcacgaaaagacaaagcgtagacgtgaaaagaaagaccggaaggctaagcgaaccactagaactagaaaaggtatggaatacctggattcaagtttctttactggtggtaagtcaacaggcaagattgtttctgtttcaaaatcatggctaaagaaatatcttgaatctaaacttccaaagagatctaggaaacgaacacgtactactagacataaatcttcatcttcaagatcatctagcaggtcaagaaatacaacaactacacgcagagaaagaacttctgttagtgcaagtgtaagtggattaagttctgtaagaagtttagctgcagcaattaaagctgtatctggtagtcatactgcaaagataactgtttctgcaagtagtgccaaatcagtaaaatcactaaaagctgcattaagtaaagttaaatctaaacgaattaaagtttctatttcaggaactaaatcggttaagtcattattaagtgcacttaaaggagttggtaagaagagtactcttaaaggtattagttctgcatcaagtcgattaaggaccttaagtaaaagaactaaatcaactaagagttcaattaaaggcttatcatcggctaatagtaaggcaagtaaaaccaataagactttagctagtcgattatcaaagactagttcaaaggtaaaatccttatataaatcagccaaaaagaacaaatttggtaaagaaattaagtctcaagctcaaaccgctgttaaatctcttaaaggaaaaggcaattttgctcaaacctttgaaagaatgactaagaagtttgataaagatttaaagattatgtcgaagaattcaagaaaagaatttaaatcgatgtggtctagcatcgaaaaaacttctaaatctggtgaaaatgctactcataaatcacttaacagctttagtagcaagtacagacgtggttggaaatcactagagtctggtgtctcaactaccttcaatcacttctggacgactatgagaaaaacggctggtaagggacttaataaagttatcgatgttcttaattctggtattggaaagatcgatacagttattggtaactttggtggtaataagaacgcagtccataaagttggtggtgtccactatgcaactggtactggttacttaggatcacaaagaagaccaataactggtccaactctagcaatacttaatgatggctttgacagccctgaaaccggtaatcgtgaaggggtttacgataaaacaacaggtgaattatctgttgtaaatggtcgtaacgttcctttggttcttgatcaaagacatgaagtatttaatgcttctgaaatgcgtgatcttggcgtaactagacactttgcttcaggtacaggctggttaaagaagctttatgaggaagccaaaaagttctggaaacaacctatcaaaactgctgaagctaactttggtaaagttactggcttaagtggggctgttaataccttaactaaaggtatgatgaaagttgctactagccaatcaaccaagtggtggtctcagctctggaaaatggttcaagataaagtcaatgatgatgatcttggacccgcatcaggtttattaaaagccgttgaaaaactaggacgcggtacttcttatagtcaagctagacgttatggcccgaattcatatgattgttctggtcttgtatcaaaggctatgaatgagtattatcacaagaattggggacctttaacggtagctggattgtggccacatgctcataaaatttcacgttcagaagcaagacctggtgatccaattttctggcttccaaattatcacgttggagtttacgctggtggtgataaatattggtcagcattttcaccttcagcccatccacaagtagggatgcattctattgcaggatcagttccaggtgtgaaaccaactttcgcacgatttaatggaacaaatactagtggtaatgattcaagtaacaaagatgtgaaagtaaaagcaaataatgctttacaaaaattcataaaacctcaagtaggtaaaggattttggcagattatccagaaaattcatgataagtatggtgataaaggcgtattattaaatggttttgctattggtgaaggtgctcctgcaagagcaaaggcattagccaaagctttaaagcgtcttgatccacgagctactagaaatggtattgccgctattttagggaattggttctttgaatctggtggactcaatccaggaatttccaattctgctggagcaattggattaggtcaatggttagatagagggccagcattaagagcctatgctcgtaggcatggtaaaagttggaaagatccagcaacgcaattgaattttgccatgtatggtgatagtgctaatacatctatttttaagagaatcttggaaggtcatggatcaatttccagtttagcagctgcgttttctagagaatgggaacgtggtggatatgattctcaacatgttcaaggtgctaatactgttagaaaaattcttgggtatgctaacggtggcattgttacaaatccacaaattgccgtagttggtgaaggtaacggccctgaaactatagttccttgggatattactaagagagctagagcttataggctgatagatagaaccttaaagcatttcaagcaacaagatgctccaaccagtcaaggtgaagattctaagctactacttgaaattcttaaggttatgacatcaattgaaaagaaacttgattctgaaattactgaaacaagaagattaggtgaacaaccaatcaatgtatctggtgactttaatgtagatggtcggaagtttgctagatacttaagaacttatttaagagaattcgatcgccaaactgttgttagagggaggtataacttaagtgacagataatattggttatattagctatcatggtaaatctagtgccgattttggttttggcataaatattgatagtaaaagagtgcattcagcgccaaacttaacttttaatcaaataccatctagctcaattgaaaatattttcagcaatgctcacagcagaagtcccactgatgtgagcttttcttgtacaatcgatcgtccggaaagatttgaagacatggatgatcttgaagatgcagtaatggattggcttgatggaagcgagtatgctccacttagattgagttggaagccgacgtacatttatatggccatagtaagtacagcaccagattttactcagtctcaagatgatatggaaagccatgagattgcaacgattactttccatatgcagccgcttaaatatcgtgctgatgggtattactggcagtctttgcctaagaatggacaaattgttaatcctgaaagattgaaagcttatccagattggcattttaaaggtactggtaattttgtattaacagtaaatgggatgccgtatcaatttaacaatattgatggggattgctacctggacggattgtcagcagattgttttcaagatcaggcaacgtctttaaatgaaaatgtcgtgcttacaaataacgatgcaccagtttttgagcatgggcttaatacgattaagtttgaacctcaaactgatgcttctttagatttaattgaatggaaaccgaattggaggcgaattctttaatggttgaaactgcaacttttgatcaattgaaacaagaatatggtgcttcagaagctgatgatcaagcagatacagtttactatttgaggcatccaattctttatgctaatgctgttgatgatgatgaaactaatggattaggtcctttgccggactttgaatcattaacaatcaatagtgttacttctcaatatccaacaggtcagggtgtttatcctattgatggaaaaaactttgataaacttgctgaacgtgaagtaattatgactgatggaggacctgatgcattgcatcagaaataccggatcatgaatattactaaaacggttggctcagaaaataccgttactattgatctaagacatattgatggtgacctagctgacttaactattgatgataatattcaacttcaaggtgcaagtgctattgaagcatttaatgcgatcgatcaacatttaactgcagcaaatccaggtatcagatttgattctgatgttagttcattatctgatgttaatttttcaatggatactccagctggaaatttacttactgatcctgatgctgaaggtgattcagcaactcaatcaattcttggtttgttcggtggcgagttagtttttgataactggcagatccatcactatcaacaagcaggaagggatatcaataagcctttaaaggttggtcgtgatattcaaagtctttcatcaacaactaatgttgaaagtacttatactgcaatttatccctatgtaacatataaatctgcacctcctcaggcaacagaagataatgttgattggagtagttatgctactaattgggattccgttggtaccgttgtttatcatggtggcggtggtttaccaatatatgattcacctgttactggtcagcatcaaattgggacagttgaaaatggtcaaaagatcaagttaggtaccgttgttcatgatggtgattcaactccagtcgatgctgatggtaatattggaaaagttattacaactgttggtggccatgattggtatccaattgaaggcggtggctggatagatgctcagtggattcatttcgataaaactggagactatattgttaatcctgcttctggtcacgttactgtagatgcttcaggtactaaaacagcaggaactaaataccctgcttctggtcgtgctgttgttacctattatggtaatggtgataaaatccatgtttactattctccatatcaaggtggcgatcactacagaactggtaagactttaaagaatggtcaaaaattcacttatgattatattgcctgtgatgaaaacggtaatttgtggtatcgaatcggatcccatgaatggatttatggccctcacatttctttaaataaatcaagttcatatgcttcttatccatcacacggtcgaggcgtgatgaagaaaaatcagcaacaatatgtaatgaataagaagaccggtcgaattgagccatctaagaagcaaataaaatgggtttcaactagaactaagcgaacacctaagtacttaaaacgaagaagaaatggaaagacttacaaaatcctcaatccaagatataaggaatacagaaagaaaaaggtcagaacaacagttaagcgtggagtttataatttgaattatggccagattgtccagggtggcgtaacttactacaagacaagtagtggtgtttatgctaagtcttcaagttttgattggaaagctgaccagtctgtaaaaccttatggaccatcaaagattttagctcaaactgcagatatgaaaggtaaggttgaagtttattcggctccaaccaaaggctcagctgttaattgggctttgaaggatggtactggtgttgatgtagtaagtactgctaaaggtgctgatggtaaagagtggtattacgttaagtatgatggtgacaaatatggatacatccctgcaaaacttactaatactaagggagatatcgatgaagaaccacatagtactgaagctgattctgatacagatgatgattcaaatagtactggtcaagatgcacaaaccattaaagtaactttacctgaaaagattttgattgctgataactgtattggcattgaaaatcaacgtgttttgaacttagatttaagttcattctttaagcatgattacaatgatacttcaggcttacaggctgatggtacttggcaaatgactgatgaagatgtatctcaattacgtgaattagctaatgatgctatgattgaacatcaaattggattacctccaacttcaattcaagtaactgcagaacaaatgaaaggtgatttagattttttaaatcaagtttgtttgaatgatcgaattggtgttgaagatgataatgctggtgttcacactacagcagaagttacttcaactgaatgggatgcattgaatcatagatatatttcaataaatattggtgatttacctaaaacctggcagcacttattgaaagagcaaactcagcaagaaataagacaagctactagcaacactaatgaaagaatcaaacatagtgatactttgattggtcgtgcagaatatgccttatctttggaaggtgatgctagaagagcagcacttgtagccatgatgaagggattaaaacttacggataaaaatggcaagccattagtttcaattaaaaaattcaataaatacttgactgaatggtcaggtaaggttttgaatcttcaaaattgggttgatggtacgaaagatgccgttatacgtggtgtagatgctgatggaaaaatcgattgggaaaacgcagtcgatttggtagctaaagatgaaaattctgaaatgcatttcaatgtaaatggcttgtcctatcgcgatccaaaaactcaaaaaataagaactgccatgggtagtgatggttcattttatgcagaacatggtatttttggagatcttatcactcttaaaggaacaatggtacaaatggatgcggctcttagatgtgatactggcggttttgaaataactattggacaaaccaataagtatgaaactggaacattcgactctgaaaaaggattgacggttggtagtaaaaattatgctttgggcttgagctctggccaattaatcatttcatcaaaagaaggaggattacatactggtaattatggaccttcttatttgagattgatgtctcctggagggcatgaactggaattaaatactaatacagcaacttttagatatgatggccaaagatttattactagttctgacttagaaaaagtattaggtgaattgcaaagtatcaaatcgttaatggttactcatgatgaaatgaataagtccatagaggattacctaaagactcaaactaaaggaaagaagtaaataaatgaaaaatgatgataaagtaattgcacattttggaacagaaatggcaaatataattgctgaacaagcgttaacgatttccaagttaaaagttttgctcgagcaagaacaatctaagaatgctgaattaaatattcagattaaagcattgcgaaaggaagataagcatggccgatctgatactaagcacaaataaggcttattcaaatgctgaactgattagagtaaggcaagacgattatggtcaaaccattacggctttgatcactgataaaaccaactcaccaattgatctttcaaaggctgaggtttcatttaacgtgaaagattggtcaggtgacgtaatcagtgataaggctacaggggatgtatccggcaatgctacatacgcaattaataagagtgtggcacttgctacaggttcagcatggtttgaaattaaaaataatgatcaaaaagttgcaactcaatcattttggattcaagtcatggaagcagcagaaaaagttgtacaaatggccgatccatttggtggcgtttcaacaaattaaaagaatcaatgattaatttccaatgtcattaagttaagacattgacaaattgaatctaatctctgtagaaccgaatcattatgatttggttctttttttgcataaaataaaggcgaaaagaacctaccttttcgccctctgattaaattattaaaccttcaaaattattgccagaaagctggtgttaattatgaaagcccttcacagaaatattttagatcgtcttgatcaaattatcaatgatactggaaagcatattcatgattttatcgatgatcctcatgccttcactaggaagcggtttttagatgcagctacagtcattaaaactactattaatatgcaaggaaaagatttgaccagtgagttgtttagagcttttggccaaaaagctattaaaaataacgataaagtagtcagtacttccgcttatgtccaacgcaaaggtcagctttcacccgcatgttttaagcatattctaactgtatttaatcagaatttatttaatatccagttatttgatcataaatatcgtatatttgccattgatgggtctgattttaatcaaatctggaatcctaaatcagagaatatcgttggaaatctcaatcataaaggaaagccatattgccaaattcatgttaatgcactctatgacctgttaaataatacttatcaagactgcatctttcagcctaagtcaaagatggatgaacgtaaagccgccattcaaatgcttaaaaagctaaattgcggaccatatatagttactatggatcgaggttataccggctttaacatgattgaaaattgtaatcgcctgcctaactgttattatgtcatacgtactaaaacgggatatggcgcatttaaggaagtagctgagttgcctaatcaagagtgtgataaggatatagcttgctgggtgactacctctaattattattatgaaacccataaggctacagaaaacgttcatttggttaaccatcattaccgtcaatatataaaatatcggtctaaaaataccaaagatggcagctgggactttggagagttatgtacaataaaatttcgtgcctgtaaatttagaattaatgatcctaaatcaggcaaagaagaatgggaagttgttctaactaatctaaatagagccgattatcccttaaaaaggatcaaagaaatctaccatttgcgctggggcattgaaacttcattcaaaaagttgaaatatgctttaggtagcgtacagtttcattccaagcaggatagatttattgaaatggagatctatgcccacatgattatgtttaacgcagtcagtcaaattgatgctcaagcatatgtaccacaaaaaaactgcaagtatcaatatgcgatcaatttcaaacagtcatgttttgtcatccaggctatgtatataatttcttcttcaactgaaatctttaaaaagattcttattcaaattagtcattacacaattccgatcagaccaggacgaaaagacaaaagaaatctcaaacccaaatcagctgtatattatttatatcgtgtagcctaatttctaaacaaaatttgggtttatttggcatgaaaaaagatcattcaaatgcgataaatcgcaaatgaatgatcttaaaagtccaagtcgataatttgtcaatgtcttaacttaatgacattggattaatttcgttggctctttttgattagaaaggaaaatttatatggcagttaaagcagatattacgattgatattgataagcaagttggtgaactgcaaaatctaacacagatttataatgcacgtgttggtgataataagacaccactgacaatcgcttggcgtaaaaatgatttgcctttaaatttaaagggattacatgcctacattgttggtaaaactggtgatggttcatataacagtgaaactggaaaaattgattttccaattaatactcctgtttctcaatttgaagatgatggatcaggaactttggatggtggccaaagtggattaactactttgctaattcctaaacaaatgtggcagaacagtggtttatttgctggatatattggcttgaaatcagaagatggttcagtttttacttccaaagatatttggttcaaagttttaggcaacgttctggatgccggtgtagaaataaattacttcattggtgattttgataaagcattagcagaagcagaaaagaagcttcaagataagactgatagttttgatcaaattaccaatgcagccttaagtgatttacgggaaaaatatagagaaatagcacaatcttcagaggatctggcttcagaatataccgcaacattaaataatattaccgactctctaaagagtatgcaggcatatattgaaacacataatattgttactacggataaatttgaaaatctggataagtatttaactaataaagttgctacttcttatgttcaacctcaagcctttaacaatttagatgatttaaagcaaaaatatccaaatggatcaaatggtattatggtaaccactgacaatggccattattatttatggaacaataattcttggaaagactgtggaacatatcaaagtacaggaattgcagataagagtattcatttagaaaatttaagtgatacattagaaaatagtctttatccaaatgttgatgaagttgaaattacaaatctactagatgggtatttttcaaaatatggaactgtaattactcaacataatgcctctgatggtgaccctgttcatacagaaaaaattccagttaaaccgggcgaagaatattatgtttacacaaataattattgggatggaaaagcaattaatatgatggaaaatgatactattattaattatttcccatctgaaaatgatgcacaaattaagtcaataaaaattaccataccgaataacgttgattcgttaattcttaatgggacaaaacaatttgttcctcgtctgtttaaaattaatagttataatcaggatcaagatgctatagataatctagcaattattttaaaagataaggaatttaattttaaagaaattaatttaacacaaattaataaaacaggatattgggactatacaagaaatggaaattatacagatcaggctcctgataataaaaatgcaatgaaatcatatcttcctgttaaggttaagccttttgagatttacagattaacgggttgcagtgcatggaatgctagactttatgaaattatagattttcaaggccatctgatttcttgttgtgataatgaaaatagtcagagtcttactacaactttcatgattccaaagaatgctgcatatcttgaagttaatgaatatttcttaaatgtacaaacaaaacttgaaaaagctgtttcgattaaagaaaagaagcctttggacggcttacattggggagccatcggtgattcttggacagccatttttgataaagatggtaaaagctatgtcaatgatgtagcggacattacaggcattacagctactaacttaggtgctggaggcactggttatgttactggtggcgcgaataattggaacaatcaattctttaagcgaaatattgatgctgacactgatatatgtactatctttggtagctttaacgatgcttattatcctgattttaaatttggacaaaaaggtgatactgatacagctactatgtggggcgctatgcttgcaacaattaataattgttataagaataatcctgatgttctaattggtattatttcaccaggtccatggggagcaattaatccatttaagacagatacaatgtcaaagctaaactcacatagtgatactacagttaacaatatggcaattaatgatttcgcagaaaaatatgtacagactatgaaagaatttgcccaaatgtactcactaccttttctagacttgtaccatcaatctaacttacggccatggaatgatgacttcatcaacaaatattatcatggtcaaagcgctacagatactacgcatcctaatccaaatggactaaaaaaatatatagcgccacgaattgcaagttttcttgaaaagattatcaaatgattggaaggtgagccttatgatcaagcgttggcgtaaattgagtgcgctagaaatgtttgttaatctaggacagctaggcatttcactttgggtgattgctatcggctgttttttaattggggacaaacattactttttctggccaccaacttttagaaatattgaaaatgatacaagaattgacatgctaattatccttgttggattagcactttttttatgcactatttttctagttgaaaataaatatgtcattgtaactctatttactttagttggtgcaatttcattagcacttgctgcactatcaggattacatgcttattttgcaggacattgggaaatgggtatggatgtggcacatgaattagcactgtttggagcaactttactggtcggccactttaagtgaggtgattcgcttgcaagatctaagtaacttgatagcaagtattgcagctttaatgggggcagttagtgctttctatcaggtaatcatgaaaaacaagcgaaatcctccaagtgatgaaaaggaactggatgaagctaagaaagaaattgaagatttaaaaagtgaattgaaggggaaaaataaagatgaaaactgaaatcgtaattaatttaatttgggctgttgtacttgttttagcaatgtttattggagcatggtataagaataatcaagctaaagttgaaaagatcagacttactcatcctgaaatggggcatgtccttgatattgttgggatgcttgctctaaaggcttccaattatcaggaaactcaagatgataaaaacggtgatcaaaagttagatgatgcaactgattcagcatacaatcaaattaaagctttatatccagctatttctattagtaaagatacagttcgtaatatggtgcaatttgcgtatgatacaattgtggccaaaacaaatactgatctaaaacaagaacaaaataatatggccaaagttaagaattcagataatgccgagcaaaagaaggatgatattgtaaatgattagtaagaaaagttatggagtagatgttgctaaatatcaacctgagtcattaagagtatacgctaaagctggtgctaagtatgccattgtccaggtaagcgtatctaactcaattgttgctcctagagcaaaggcacagattacaagtgcaaaagctaacaatatcatgccaatgggttatttttatggctgctttggtcatagtgctactcaagccgcgtcagaagctcactttgcaattaagaatgcaaaaagtattggattgcctaaaggctcatatcttggtgtagactgggagagaaccgataataatgtgaacggcaatgttagtcaaaacactgctgctattattcaagcaatgaaagttattcgtgatgctggttatattcctctcttatattcaggggcagatttgctaagaaataaaattaataccaagcaaattattaaacagtttgggacttgcctttgggttgcttcatatcccgtttccagtcgtgtgaatactgctaattttaactacttcccatcaatggatggtgtagcgatttggcaatttaccgataattggcatggtcttagcgttgatggtgatattaacgttattgacttaaaaggtaccacaaaaaagtatgcttcaaaatctaagtgggttaaaaaatctggcacttttattttaggtgaagctttaaagattcatacttcacctcatattaattcacctgctattgctaagttgcaaaaaggtagtgtgattaaatatgatgcaactttacaaggaccactgcgtctttggttacgacaacctcgtaacaatggaaaatatggctatgttgttggtaaagataagtatggaaaaaagttaggtaaattcaagtaaatcatagctgctgagagcgtgattctatgacgctcaaattttgatttgattaaattattaaacttggcaaaagaaaacattagcaacttactataaagaaagatccgctctaggggtaaaactctagagtggatctttttttgcgttttattttaaaaattatgaaaaatcattataatctattttataattcggtttaagattgaaaaccgaaaaaaccgaaaaaaaaccgaaaacttcacggaatttggaggattttgaaagaatgacagagaataataaacaagccaaaaccactgataccaagggaaaagccaactgcgacacagcaatcttcgctggcggttgtttttggtgcatggtcgaacctttcgatacagttgacggagtagaaaaagtagtttctggttatactggtggtcatgttgctaatccaacatatgagcaagtctgttcaggtacgactggccatactgaagctgttgagattacctttgatccagcaaaaatatcgtatgatcaattgctaaactattattggcaagtgactgatcccacagatgcaatggggcaattccaagatcgtggtgataattatcgacctgtaattttttataattcacctgctcaaaaagaagcagctgaaaaatctaagcaaagattacaagctagtggtaaatttgataaaccaatcgtaactaaaattgaaccagctaagccattttatccagctgaggaatatcaccaagatttttataaaaaagatccacttagatatgcaatggaagaagctggtggaagagctaagtttatcaaggaacattgggattaataaaaagcagatcataactgttataagctgtgacctgcttttttactttcaatattttagattatgttaactatttctttaagttgcttttgataacctcgattggattgagccaagttccgttgttaacgttccaattcttacatggaaaaccatatttgtttatgtaatctttatttgtttgagtaacgccaaggtgtaagtgtgagccagttagcttaccgatcttttgacctaatttaatcttttgaccagtcttaacataaatgtcttttttcttattaaacccttcttggtaaacttcaacgtaattatcaggactaataacccagatgaaccagccaaggccgttgccataagcaacctttttaacagtaccttgatgaattgcatatacgttagaatgcccaacttctgaaaaaccaaaatcccaaccatcatgaaagtaggaaggtggtgtagtagaacgcatatagttagttatgccaaaagtttgtgcattatacattggacgaacaccatttttcttgttggctttaaacggataagcccacttgaggttcttgggttgaacttcagttgtattttgtgagtcatcaagcgtatcagcagaagcagtggtggttgataaaccaacgcttgaagttaataatgcagtacctaacaaagaaattattaatttacgaaatttcattataaaaagaaaccagataagttctgatttttatctcctctcttaattcacctaaactattgtagctcagcagttttacgagaaagttacaattaaatttcgattaataacaaaaagttagtatgagtatatgtgaatatgtttttaattacgagtctaggtatttttgaaatttctttactttattttgggatttacatagaattaaattaataacgtttacattgaatttagtaaatgatagtagacattaatttggctcaaaaataataatttggacaatgaaagtgaaactgtcaaatcttttgtgtaaatagttctttctcgtaaattgattttttaattatttatttaatcaaagtaggattctaaggtgtcctgaacctgaccaaagcctttatgaattcgattgaaataacggtcattgtagctcattgcctgaatgccaataaaagcatcaagcgactgttcagttggaaactctgccttaggcttagctttgcgcttgatcacattgttaaatgattcaatcatgttagtcgaataaattgaagctctgatctgcttgggatagttataaaagaccagcagatctggttctatgtctttcaagcttctgataacatggctgtaaaccttgccccatttggtatagaagtcatgcaggacagctgtggcttcttctttgtttgtctgttgatgcacctgtttgaattcgttcatgatcttttcacgatcgtcgacgcgtactttagcgcagatattgcgcatgacatgaaccaaacagcgttgaaaatgagctttaggataagtcctggccaaggctgttttcatgccaacaacaccatcagaaagaaaaagctcaacttgctttaagcctcgggatttcatgttttgaagcatatctgtccagacttcaatgttctcactaggagcaatgcagtaatcaatgacttccttatgtccattaggtttaatgccaatggcaatatatactgcttcacgctcaaacgtttctcggcgcaaaggaaggtatgtcgcatccaaatagacacagaaaaacttgtcgcttagcttgcgtttgtggtaagcctcaacctttggaatcatctgcttggaaatatttgatacctgagctggactgtaatggctgccatacatcttttcaattagatcggctatttccctggtggtcacgcccttggagtaaagcttgataatcatgctttccaagatatccgagtgctgcttgtagccaggcagcgtgtgctgatgaaattgaccgttgcgatcccgaggcacttgcacttcaattgggccaaattgcgtatcaactttgcggaaataagcaccatttctagagttgccagtattccagccatttctggcatagggatcatagcccagaaaggcagtcaattcagcttctaacaagttattaacagcctgttgtagctctttgcgcaataaatcatttattttgtctggattgaatagagcttgagcaaaatctttggtaaaatcattcatgaaggagttcttctttctgtatgtgtttttttgttcaaaccaatcatacgagaaaggaactcctttttctaatgtttaaagaaataaatttaaggaatcattcatccttacacaaactattttacagtctcatgaaagtagagaataataatgacgaagttaaataatgaatatatggttggtctagatattggtactaattcatgtgggtgggttgctactgattttgataataatatattaaaaatgcatggaaaaagagcacttggctcgcacttgtttgatgaaggcgtatcagctgctgatagacgagcttttagaactactaggaggcgtataaagcgaagaaaatggcgtcttaaattgttggaagaaatttttgatgaagaaatggcaaaggtagatccaaatttctttgctcgtttaaaagagtcaggactttctccattggacacaaggaaaaatgtgtcttcaattgtctttccaactaaaaaaatggataaacaattttataaaaaatttccaactatttatcatttaagaaacgctttaatgaaacaggataagaagtttgatcttcgggctatttatattgccattcatcatatcgtgaaatatcgaggaaattttttgtctaattcatccataagtaattttagtgcgtcaaagattgaaatcgataggtttgtaaatgaactaaacgatctttattccatatttctgccagaaagtggagtgatttttgatgcaggaaatgcttcaaaagttgaagacattattcgaaatgaacaaatgtttaaactggataagataaaagaaattgctgatgtgttacccgacactgaaaataagtctggtctaaaactaagtaaaaaaatttcaaaagaaattagcaaagcaattttaggatacaaagcaaaatttgaaattattttacaagtaaatgtagacaagactgacagctcaatttggaattttaaattaaatgatgaaaatgcggatgtaaatttgagtgaaattacttctgatttaactgatactcagttacagatattggatttagttagaaacttatttagcctgaattgtcaaattaagtgcaacagttaggttatgaagagatatattgcttgaagagttcctctgctgtgtgatattggaggattcggcgatatttgtggttaatggcatcagttgcctgttgaacataagcttttgacttgtctttcatgctcttgcccttagggaagaattgacgcaaaagaccattgcagttctcattggtgcccctttcccatggagaatatgggtgagcaaagtaaatctggcagcccttgatcttggtcatatccgcaaactcagagccattgtcaaacgtgattgatttaaaccaggcaggatgtctgtcaatctccttttgaagcagcctttggcatgtgcttgcccgatagtcaggaatcttgataactacttcaaagcgtgtggttctttcagtcaaagtcattaaagcaggctgattcttgcgtctgacgcctttaaccagatctccttcccagtgcagcggagcttttctgtcttcaacctccttaggacgctgttcaatggaattgccaagatgcttcttgtgcaaagcgtgaccgccatggctgtgatgacgcttgttcctgcgtcttttgagcttcataggcagatcaatattgcttatgtccagcaagccctgatcaatatagcgatagacggttggtgtgctgggacaagggtagcctggcatagtcctttggaattcaccaacgaactcatcgatgctggtggcatcaaatttagctttaaagcgtctggagagcattctcaaaaagacagcataatgcttcaatggattgcgctgatagcagtttttgcgacgcttctcataataaatctgtgcagtatcagcgtaatagtgctcatacaataaatagctgctgtctctttgcaggacgcttccgcgtttgatttcgcgactgattgtcgacttatggcagccaacttcttgagcgataacagtacgggaagttatgccggaatccagcattgcttgaatttgtccacgttgtacgctggttaattgatgatagtgcttagaaatgctagaatttgaattggtcatgaagatcttcctttcttgatttttcgtcacttcaagtttaggtcttcatggcctttttgtttaacacttagtgttgcacttcaattttaaatccgggaaataactttattaaacgacttacaacaaaagatacttatttgtttggtgaagatgttcttccagcaaatagtcttttatatcaaaaatatactgttttggatgaattaaataaaattagtgtgaatgggaagaaattatctgttagcgtaaagcaagaactttatgaggacttattcaaaaagaataatactgtctcagctaagcagcttaaaaattggttaatagaaaatcagaaattgccttatatcaaaattaaggggttagctgatcaaactaaatttaattctagtttatctacatacattaaattaaaaaagtcaggtttatttgttgataaacttgactcaaatgaatttcgtgatgattttgaaaaaattattgaatggtcaactatttttgaagataagcagatttatatacaaaagcttcaaacaattgattggcttacagcaaaacaaattcaattcctacaaaatattagacttcagggttggggcagattatctaaaaaattgttaactgctattgtagattcaaatggtcaaaatattattgagcagttgtggaatagccaacaaattttcatgagtatagtaaataaagcagatataaaaggcacaattacagatgcaaatcaagatctcatgcattcaaatagtatggaagatattttatcagaagcgtatacttctcctgcaaataagaaaatgattaggcaggttgtaaaagttgttcatgacattcaaaaagctgcttctggtcaagcacctaaacaaatagctattgaatttgcacgtgaaagtagaagaaattctaagttatcacaaacacgagggcataagctacaggatatttaccaaaaaatatcaggagatatagtaaataaaaatttgaaggataagctggctgaatatatcaagaataatcaattaaataaagataaatattatacgcgtggtgctagttaaatcgttttagttaataaaaaagtccaatcttgttagactcgacttgtaaatagtaataatagaaaagagtctgatctgattgaactgccttaagcttaagcgttttagccaccatttacaagttagttttaaagatttagtgataatttgtcggcactggtatcgtttgtatgcaccggctgagtttactcatcggcgaaatattgatcaaattaaaactacggacagtctgattttggctttacttatctggcaagctaagacaggaattgaatcacaaagaagattctgtgaatgtttcaattgtttatcacactcacgttttaatcggcgttcacgtcagctattgcaattgatttatcagatacggcaagaaatgaataaaaaggttgacctgaatggacagttcttgatcattgacagctttccggtacctgtttgccaaccaattcgaaactatcgtgctaaaatttttcgcggttatgccaacattggttataaggccaccaagaaaatttacttctatggtttcaaagttcatgccattgttagcgatgacggttacattcttgattatgtcgtaacaaaggcatcagttcatgatgccagggagacagttgaactgatagaaaatacccatccatctaattactatcttcttggcgacgaaggctatttaggcaaagaactgcatcaacagctaaaacaaatgggttacgaactttggacaccatatcgtaaaaatatgacaggagctaaaaagcacaatgatcatcaattgatggctattcgcagaacaattgaaagcgacttttcgcttctgacctattacaatgccgagaacaatcgagcacgtagtctgataggctttcaaagccggttggaaattgcaattttagcttataatttggcttattgtctagaacgatttaactagcaccacgcgtaaatattatctttatttcatgcaacttggaagagatgcttatactggtaagccaattaatattgatgaagtatctcagtattatgacatagaccatatcttgcctcaaagttttattaaagatgattccctgaataatcgtgtgttggttgctaaaccaataaacaatggtaagtcagatggagttcctttaaaactctttggtgataatctagctactggtttagggataacggttaagcagatgtggaataactgggctgataaaggactgattaataaagcaaaacaaaataatttattcctagatccagagaatattaataaacatcaagcttcaggttttattcgtaaacaattagttgagacaagtcaaatcataaaattagcaactacaattcttcaagctgagtatccaaagactaaaataatagttgtcaaggctagttctaatcactatttacgtaatgagtttgatttgtataaaagtcgagaggttaatgattatcaccatgcaattgatgcatatttaactactatttgtgggaatctactgtatcaagcgtatcctaaattacggccattctttgtttatggtcaatttaaaaagtttagttctgatcctaaaaaagaaaatgaaattttaaaaaagaccaaaaattttgactttgttgccaaacttttgggtagtaaagcaccaaatgagatcagatctcaacaggggaaagttttatttgaaaagaataaaattcgattgcaacttaataaggcatataattacaaatatatgcttgtatctagagatacgacaacaaagaatcaagagatgtttggaatgactatatatcctcgggctgaacgggatatagcgaagagtcgtaaattaattgaaaaacgtaaaggattttcaacagatatttatggtggctatactggtactgcagcagcctatatggcaattgtaagaattaataagactaaatcttcacagtacaaagtaattgctgtacctatgacgaagcgtgctattttaaataaagctgaaaaagaaggtaactatgaaaagattctaaagcaaattttatcaccaagtattttatacaacgataagggaaaacgaaaagcaggagtaatatcatttgatattattaaaggtaaagttccatataaccaggttgtgcaagatggcaataaaaaatttttgttaaagagtgctatttatttatgtaatgcaaaacagttggttttatcagaagaggcaatgagagtaattactggtcattggctagattctgataagcaagatcaagaacttttggatgtttacgatgaaattttagaaaagattgatagatatttacctttgtttgacattagagattttagaaataaattacataagggtagagaaaaattcttgaaattaaacgctgaggataagtttaaagctattattcaaattttgaagggtttgcatgataattctgatacaggtgaacttaaagatattggtataactgtaccatttggtcaacttcaaaataattctggaattacattatcttcggacactattttagtttatcaatcacctactggtttgtttgaaaaacgcgttaagatttctagtttataaaaataaatgaggaaccgacatgtggttcctcatttttacataaaaaaagtccctcgatagctcgggacaagtgttgaaactctgcgtactaaaacgcattgcttgattttaaattatgattgttagatcaataaggttaagagttgggagctacccaacaaataaataatatcattatagatatagatgtacaaggagaaaaaatgggatggcgtaacgtaataataactcagcatgcaaagctaacatactctatgaatatgcttatagtccaaacaaaagatggtattaatcaaatacctattgaagatatcaatttggttttaatttcaacatcacaggctgtgattactagtgctttgataagtaagttagccaaaaatcaatgcaaggtaatctttgttgatgataaatatcaacctgttacagagacagtgaattattatcctggggctagggacataaagaagttgaaaatgcaatttgaatggaatgaaagaagaaaagaaaatttatggaccaaaattgtagctgctaagctaaaaaatcaaatatcggtgttaaaaaattatcgaattgatgaaactgaagttgagcaagagctgtacaagttagaggtgaacgatttatccaatagagaagcagcggctgctagaaaatatttcatgaagttatttggtaaggactttattagaagaaattccggagtgattaatgcagcactagattatggatactcaatattgctttcatccttcgatagagaaattgcaatgaatggatatttgacttatctgggaatacatcatcattcagtggaaaatcaatttaatttagcttgtgatttaatggaaccatttagatccatagttgattattgggttaaggcacacgaaaatattaccagttttacaccagatattaagtatggattagttgagttgcttagcttacaaataaaattcaatggtaggaatacaattttaacgaatgcaatttctgtatatgtaagaagctgccttagatatttaagtggagaaacagatgatattagaatagagatgagtttgtgtaatgaggtaccgaatgatgcgattaatgataatgtttgatttgcctacggacactgccgctgaaagaaaagaatatcgacaatttagaaaagctctaataaatgaaggatttttaatgattcagttttcggtgtatgaaagagtatgtgtcactagacaaacagctaattttttagaaaagagaataagaaaatttatgcctagcaaaggtgttgtgcaaagtctaatggttacggaaaaacagtacagtgatatgcatttcttggttggggatgcagtaaaagatattcgcaatacttcagacaggacagtgatactatgattgtttcctatttgtcacataagaaaatctgtttaaaagatggaattaatgttatttgcactcaaagtcccattgcctataaagatctggttttaggttttcaagccttaaatgatctaatagtatgttctgatgacgaatacaacaataagtctattagtaagagttttgattttgtaggagccccgttgttaaatgacaatattatggcaaagtatatgaatgtcattattaagaactttatttctaacttggatgaggtaaacagaaatagaattttaaaatctttttattcattagaaacagtattgaatgattctttgcttttggaagatttacctttagaaattgattttagcgaagatattaaaaagctgttgaaaatggttaacattcatttagatgctcaattaatgttaacgagactgtaaaatagtttgtgtaaggatgaataattccttaaatttatttctttaaacattagaaaaaggagttcctttctcgtatgattggtttgaacaaaaaaacacatacagaaagaagaactccttcatgaatgattttaccaaaaatatagcacaagctctattcaatccagacaaaataaacgatttattgcgcaaagagctacaacaggctgttaataacttgctagaagctgaattgactgcctttctgggctatgatccctatgccagaaatggctggaatactggcaattctagaaatggtgcttatttccgcaaggttgatacccagtttggaccaattgaagtgcaagtgcctcgagatcgcaacggccagtttcatcagcacacgctgcctgactacaagcagcactctgatgttttggaaagcacgattatcaagctctactccaaaggcgtaactaccagagaaatcgctgacttgattgagaaaatgtatggcagtcattatagtccagcccaagtatcaaatatttccaagcagatgctccccaaggttgaggcttatcacaagcgcaagctaagcgacaagtttttctgtgtctatttggatgcgacataccttcctttgcgccgagaaacgtttgagcgtgaagcagtctatattgccattggcattaaacctaatggacataaagaagtcattgactactgcattgcgcctagtgagaacattgaagtctggacagagatgcttcaaaacatgaagtccagaggcttgaagcaagttgagctctttctttctgatggtgttgttggcatgaaagcggccttgaccaggacttatcctaaagctcattttcaacgctgcttggttcatgtcatgcgcaatatctgtgctaaagtccgggtggatgaccgcgaaaagatcatgaacgaattcaaacaggtgcatcaacagacaaacaaagaagaagccacagctgtcctgcatgacttctataccaaatggggcaaggtttacagccatgttatcagaagcttgaaagacatagaaccagatctgctggtcttttataactatcccaagcagatcagagcttcaatttattcgactaacatgattgaatcatttaacaatgtgatcaagcgcaaagctaagcctaaggcagagtttccaactgaacagtcgcttgatgcttttattggcattcaggcaatgagctacaatgaccgttatttcaatcgaattcataaaggctttggtcaggttcaggacaccttagaatcctactttgattaaataaataattaaaaaatcaatttacgagaaagatcccggatttaaaattgaagtgcaacactaagtgttaaacaaaaaggccatgaagacctaaacttgaagtgacgaaaaatcaagaaaggaagatcttcatgaccaattcaaattctagcatttctaagcactatcatcaattaaccagcgtacaacgtggacaaattcaagcaatgctggattccggcataacttcccgtactgttatcgctcaagaagttggctgccataagtcgacaatcagtcgcgaaatcaaacgcggaagcgtcctgcaaagagacagcagctatttattgtatgagcactattacgctgatactgcacagatttattatgagaagcgtcgcaaaaactgctatcagcgcaatccattgaagcattatgctgtctttttgagaatgctctccagacgctttaaagctaaatttgatgccaccagcatcgatgagttcgttggtgaattccaaaggactatgccaggctacccttgtcccagcacaccaaccgtctatcgctatattgatcagggcttgctggacataagcaatattgatctgcctatgaagctcaaaagacgcaggaacaagcgtcatcacagccatggcggtcacgctttgcacaagaagcatcttggcaattccattgaacagcgtcctaaggaggttgaagacagaaaagctccgctgcactgggaaggagatctggttaaaggcgtcagacgcaagaatcagcctgctttaatgactttgactgaaagaaccacacgctttgaagtagttatcaagattcctgactatcgggcaagcacatgccaaaggctgcttcaaaaggagattgacagacatcctgcctggtttaaatcaatcacgtttgacaatggctctgagtttgcggatatgaccaagatcaagggctgccagatttactttgctcacccatattctccatgggaaaggggcaccaatgagaactgcaatggtcttttgcgtcaattcttccctaagggcaagagcatgaaagacaagtcaaaagcttatgttcaacaggcaactgatgccattaaccacaaatatcgccgaatcctccaatatcacacagcagaggaactcttcaagcaatatatctcttcataacctaactgttgcacttaatttgacaattcaggttacgagaaagatctatttacacaaaagatttgacagtttcatgttaacaccatatgctataattgaaacagttcttaagattcatcaagaatataatcttgatagtattcccgtgttttgtaatgtagctcattaccttgatgaaacacagttaaaagaacttagtaagattgttagacaacttaaattgaaaattattttaattgaattcacagataagaaatatggggtagcagtcaaggatgctcaagttgcatatattgatcgagatcttgttgattggtattagacaattgattaaaaagatattatgaaatatcggttttagatgattgttagatcaatgaggtttagatctagaagatggtacaaataaaccattttctagttttagatgattgttagatcaatgaggtttagatcaaatgcttttcacgatggaccggatttatagttttagatgattgttagatcaatgaggtttagatcaatgggcgacttcttttattgttgggaaacgttttagatgattgttagatcaatgaggtttagatcccgtgaaaacggcgtttacatgcgtaagacgttttagatggttgttagatcaatgaggtttagatctattagcttttgcggcggtaccaacgtacggttttagatcaatgaggtttagatcccactatcgcgcctggaatacctgttttctgttttagatgattgttagatcatgggagtcagaacagtaatatgcataaatttacaaatatttttctgtaaataaaaatcgctctagagaaactctagaacgatttttggacatacttgatcttagtatctattattacttagcgtaatcatcaatacccaagtgctccaaaataagtgcggcagtttcttcaatggagcggtgagcaacattaattacatagcaacctaatttcttataaagtgcttgtgctgattcaagctccttgttgattgaatccatattagaataagtagtatcaggattcaaaccataagcgatcattctttgacgtctgatttcgttcaatacagatggatcgttagtcaagccaataatcttcttaggatcaatttcgtagatttcttttggaatgtgagtttcaggaacaagtggtaaattagctacctttaagttcttattggctaagaacaaagaaagtggagtcttagaagttcttgataccccaagtaaaacaacgtcagcttccaagaaaccttttggatctttaccatcatcatacattacagcgaattccattgcggaaattctgtcaaagtacttttgatttaagctatgctgtgcaccaattttttgatctggtgtcatatgagtagtttgttgaattgcttcaactacaggtgagaagatgtcaacacattcaacattatgctcacgggcaaatttgataactggcatttgcatttcatctttaaccaaactgtagataattaccaagtttggatatttttcaatttctgttaaaacttcgtccaacttcttttggttagtgataaaggggtaacgacgatagttgatattgcagttaggaaattctgcagctgcagctgtggcgttactaaaagcagtgtcaccagccgcatcagaaataataataatgtttaattcattttggtcttttgtttctaccatattaagctcctcgtgtattattaaatatctttctgaaaataattatactattaatgaaagcggattaacaataaaaactcagctcttttattaaggtaaagtagtcggtttacttaacttaaaaatttatcaaaaagtttttgaattgtattgaccctaaagattagtttggtataatttaagtaaatgtatggcgtaacgccaagaaatggaaggagggatcacacatggctaagacaatcgttcacgaaaacgagtctattgatgatgctcttcgtcgtttcaagcgttccgtttcaagaagtggtaccttacaagaataccgcaagcgcgaattctacgaaaaacctagtgttcgtagaaagttgaagtctgaagctgcacgtaagcgtagacattattaataaactactgagaaagctacctgtttttgggtagcttttctttttgacttcttgaagcataattttgattatgttaagtaaatatttgttagttttattttagttaagaacatagtttgttataatactattgggtttttaatagaaagaaggatattaaatgagtttgtcagatcaaatcatggctgatatgaaatcagctatgaagaatcacgacaagacaactcttaatactgtccggatgatcaaatcggccttaatgaatgaaaaaattaaagcaggacacgatttaactccagatgaagaattaactgttcttaatcgtgaaaagaagcaaagagaagaatcgattgacgaatttattaaggctaatcgtgatgatttagctgaagaaaccaaaaaagaattagcagttgtagaaaagtacatgcctaagcaaatgaatcaggatgaacttagagcagctgttaaggaaacaattgatgaagttggtgctaaaggtaagtccgactttggtaaggtaatgaaagctttaatgccaaagattaagggacgtgccgatggcaaggctgcttcgcaatcagttcgtgatcagctaaattagtagtaacaagaaggagcgggtctatttggctcaaacaacttttacacctcaaagaccagaaaatattcaaaaactagttggagttaatgacggaaatttaaagcttctttctgaaggttatgatatttctgtgtcagatgtcggtaatgagattgtcattgcaggagacgatgaagagaagatcaagaaggtagttgctgttctaaaggcactcgatagtgttgtgaatactggtgttaacatcggtgcgcccgacacagtaagtgcgatgaagatggctgacaagggtaccacagagtactttgcagacctatataaaaaggttttgattagggatgctaaaggtagacctatcagagtcaagaatatgggacaaaagcgttatgtcgaagctattgataaatctgatgttgtctttggaataggaccagctggaacggggaaaacattcttagccgtagtttgtgcaattgccgcctttaagaagggagaagtttctcgaatcattttgactaggccagctgttgaagctggtgaatcacttggatttttacctggtgacttgaaagaaaaagtggatccatatttgagaccaatttatgactccttgtatgctattcttgggactaatacgactgaccgtttgatggaacgaggcgtaattgaagttgctccacttgcttatatgcgtggacgaactttagatgacgcttttgtaattcttgatgaagcccagaacactacagatgcccagatgaagatgtttttaactagacttggatttaattctaagatggtcgtaaacggtgatatgacacaggtcgatttacctggtcgacagcatagcgggttaattgatgctagacatatcttgaagaatatcgaccaaattaaatttatcaacttttctgctaatgatgttgttcgtcaccctgtagttgcgaaaattattactgcttatgaaaaagaggacattaaacactaaaaatggatccaattgatattacttataatgatgaagttggctttttagatgatgaaaagcgtaactggcaagactggattatgaaacttttgctgctagctaagaaggaaattggcaaagataacaacttagagatgagtattaactttgttgacgaagatcgtagtcatgaaattaatttaaagtatcgtgacaaagaccgtcctactgatgtaatttcctttgcaattgaagatggtgaggattcaattgatcttgcagcatttgcagatgatccagactttcaagaggatatcggtgatctatttatgtgtcctagtgtgattaagcgtcacagtaaagagtatggtacaggttttgatcgagaatttggatatacaatagtccatggctttttacatttaaacggctacgaccacattaagccggatgaggccaaagaaatgtttggtattcaaggaaaagtgttagaagattatggtttgccattgtatcctgatcaattagatgaaggcagaggtaaataatggaagaaaaagagtttaagtctggctttgttgctttagttggtcgtcccaatgttggaaaatcaactttaatgaactatttagttggtcaaaaagttgccattacgtctaataaaccacaaacgactcgtaatcgcatttcgggtatttatacttcagatgaaatgcaagttgtttttgtagatacgccaggtatttttaagcctcattcaaaacttgacgactatatggataaggctagtgtatctagtttgaatgacgttgatttagttttattcatggttgaacctgaggaaatgggtaagggcgatcaatacattgccaacttgttaaaagaagtaaaagttcctgttcttttagtaattaataaagttgatgaaattcatcctaataagcttttgccaattatggattcatatcacaaacttgagggctttaaagaaatactaccgatttctgctactcaaggaattgggattgaagatctgcttaaaacgattaaggaatatttgccagtaggcccacaatattatggtgctgatcagatcacagatcggcctgaatattttgtggtagccgagttaattcgtgaacaaattctgcgactgacttcacaagaagtaccacatgctactgctgtcgcagttgatcatatgaatactcatcaaaatggcaagctcttgattgaagcgactatctatgttgagaaagacggtcaaaaaggcattattattggtaagggcggtaagatgctcaagcagattgggattaattcacgtcaagagattgaaagattgcttggtgaaaaggtcaacttgcgtctctgggttaaggtccaacataactggcgttctgaccctaactttttaaagcgaataggctatgacaaaaaagaactttagttgaattactgttgtataagcgttgtcgaaagatgacgtcttttttgtatgtttagggagacaagaaaattctattcgttggataactaatgggataaaaatagatacaatagtaatgacaaagtgatgaaattttgggatctattgttttgtgattgttgttatattgggatttgtttactgtattctccacgtatgtggaggctgaaacccagtttcgaagttgattctgggtaaagtcttggtattctccacgtatgtggaggctgaaacagcagtctttttgtactatagactatttatgatattatgatatcttcatcagaatatctataaaaaatgaattttaaatactaaaggagtcatgatatggcacgtgaactaaaagaagttcagggtattatctttaaaaggcagaaatataaagaagcagatttattagccaaaattatgactaaacaagatgggattatgactctgattgttaaaggagccctgaggcctaaatcaagattaagtgcagcaacattaaatttttctattggtacttacgtaatttatacgagcgaaaagggcttaagtaatttacgcacatataaaggggcaaggcagtttgatggcttatataatgatttaaccaagaacgcttatatttcttttatttttgatttaattgatcacgcctttgtagaatatcagccaattggtaaatattatgatttagctttatttgctttgaaaaaaatagatagtggcgttgatgcagaaatgattacacaaattgtgcagatgaaaatattagcagcatatggtgttgagccacagctaaagcattgtgttatttgtggtaaggaaaaaggcgtttttgattattcgattaaaatgggtggagttatttgtagcgatcattttagtacagttactagccgaatgcatttaaagccaaaagaaactgctgtaattagaacaattggcttattaccgattgagcgattaggcgatattaaaattaatgaagaaacgaagagggctactagaaaagcgattgatcgtatttaccatgaaacgataggcctaaatttaaagactaagaaatttttagatgaattaaaactttttagttagtaaaaatctggttttaccatgacccatgtgttaaaataaaaacgtatttgacgatgatgaggatttaagaaaagtactagttcagcgaatgtcggtcggtgtgaggacatctaggaaaaggcacctctagtcatattgttcaattaagagcaggaaggatacttcctgaattagggtggaaccgcgataatatttcgtccctatgcaaaattttgcataggctttttttatggcctagcgcaggaggagattaaaggaaatggcagataagaaattaaatattcagaatatgatctttaagctggaacaattctggtcctccaaaggttgtatgattatgccttcatacgatgttgaaaagggtgcgggtacaatgagtccttacacttttcttcgtgcagttggtccagaaccatgggcagcttgttatgtagagccttctagaagacctgcagatggtcgttatggtgaaaaccctaatcggttattccaacaccaccaattccaagttgttattaagccagctcctaaggatattcaacaatattacctagacagtttgaaagttttaggtatcgatcctttggaacacgatattcgtttcgttgaagataactgggctaacccatctatgggttgtgctggtgttggttgggaagtatggcttgacggtatggaagttagccaattcacatacttccaagttgttggtgaattagatgttaagccaactatgagtgaaatcacttacggtgttgaacgccttgcgtcatatattcaggatgttaactcagtatttgatcttgaatggggtaatggcattctttatcgtgatatcttcaagcaaccagaatatgaacattctaaatatgcatttgaagaatcaaatcaagaacaattgcttcaattctttgatatttatgaagcaactgctaagcatttattggataagaacttggttcacccagcatatgattacattttgaagtgttcacatacttttaacttgcttgatgctcgtggtgctgtttcagttactgaacgtgctggttatttatcaagaattagaaatcttgcgcatgaagttgctgtcaaatttgtcgaagaacgtgaaaaacgtggcttcccattgcttaaaagtgcagaagacaaaaaggcgggggtagaaaatggctaaagattatttatttgaaattggtactgaagaaatgccagctcacgttgtaccacgcagcgttaagcaattagctgacagaacaagaaaatttttaaaagaaaatggcttgaaatttaaagatattaagactttttcaactccacgtcgtttgactattttggttgaagatttggctgaaaagcaagacgatattgatgaagttaaaaaaggtccagctaagaagattgctcaagatcaagatggtaattggactaaggctgctcaaggatttgctcgtggccaaggaatgactacagacgatatctattttgaagaacttaagggtactgaatacgcttatgttcacgttcaaaaggaaggtaagaaagctagtgatatcttacttggtatgagcgatatcattaaggcgatgactttccctactaagatgcgttgggattcaaatgattttgagtttgttcgtccaattcactggcttgtttcattatttggcagtgatgtaattcccgttaagattttggatattactgcaggtcgtaaaactcaaggccatcgtttcttaggcgattcagttgttttggccaatgctgatgactatgaagatgcattaaaagatcaatttgtaattgctgatgcagatgaacgtaaagatatgatcgttcgtcaaatgaatgaattagttaagaagaacaactggcaagttaaaccagatcgtgatttactagaagaagttacttatttagtagaatatccgactgtatttgctggttcatttgatgaaaagtatttgaagattcctgatgaagtgctgattacttcaatgaaagacaatcaaagatactttgaagtctatgatgaaactggtaagttaattaatcactttattgctgttcgtaacggaaataaagattaccttgataatgttatttcaggtaatgaaaaagttttagttgctcgtttggacgatgctcaattcttctatgatgaagaccgcaagtatccacttagtcattttgttgatcgtcttaagaatgtttcattccacgataagattggttcaatggctgaaaagatgcaacgtgttcgcatgattggtgattacttagctaagcgttgggatttaccagagaatgtagtcaaggatttcgaccgtgctagtgaactttacaagtttgacttagttacccaaatggttggtgagtttgcagaacttcaaggtgtaatgggcatgcattatgctcgtcttgcaggtgaggacgaagaagtttcagttgcaatcaaggaacactacatgcctgccactgctgaaggtccacttcctgaaactacggttggttcattattatcaattgctgataaaattgatacaattgtaaccttctttggtgcaggaatgattcctacatcatctaatgacccatacgcacttcgtcgttatgcatatggtattgtaagaatcttacttaatgagaagtggtcattaccatttaacgaagttttaccagaaatcattagtatgcttaatggtgtaactccagctaagctacctaagagtgatgctgaccaggaaattgcagacttcattcgtgatcgtgtcaagcaatacttacaaaagaatgacttcaagtatgatattattgatgctgttcttgcttcaagtcaacaagatccaagtcaaattttagcagcagctactgtattgcaacttcaccatgatgatgaagaattcaagccagtagttgagagtttgactagaattgataacatcttaaagaaggctaaatttaagagtaatactgctgttgatgaaagtctctttgatgataacagtgaaaaagaactttacgctggcgttcaaaacttgcaagatattgaaagtttggctgatctctaccaaggttttgttcaactgcaaccagtgattgatcaatactttgaaactaatatgatcatggctaaggacgaaaaggtcaagaataaccgattagcacaattatatgcagttaatgaattagcagatcgtttaggtgacttaagcaagttagttattaagtagttaatttagatagaaaaagggtgattcatatggctggacggattcctgaagattttatttcagaggttcgcagtaacgtcaatattgttgatgttatcagtcagtacgtttcgcttgagaaaaaaggcaaagactatattggtctttgcccttttcatcaagaaaaaactccgtcgtttactgtaaatgctgataagcagttttttaagtgctttggttgtggtaagggtggaaatgtttttaaattcttgatgtataaggatgatttaacttttcccgaaagcgtcgagcgagtagctgagtttgcccatattgctatgcctaatggatatggtcataatagtggcaccaaattaaatccacttatgcaaatgcatcaggatgccgttgatttttatcatcgtgtgcttttgactactaaagccggtgaacgggggatgcagtatgctcaaaagcgagaactagatcaagaaatattagaccattttaagataggctatgcacctaaggctgataatgttttgattacttatttacgtagtaaaggttatcaagatgatgatctagcacaaagtggtttatttgttcaagctagggatgggcagttatacgaccgttttcgtgaccgtttgatgtttccattggataatgaaaatgggagaacgataggcttttctggtagacgaatttctgatgataagaccgaagctaagtatatgaatagtcctgaaacggggatttttaccaagtcaaaggtattattccactttgcagaagcaaagaaagcagctcgtggtgaaggtcacttagttctatatgaaggttatatggatgtaattgcagcatataaagcaggggtgaaatcgggaattgcctcaatgggaactagtttaacagatgaccaaatatatttgttgagacgtattactcctaatatcattattaattatgatggagatgatccaggagtccatgccgaagaacgtgctgcacgtatgtttaataaagatggcaattttaatttaggaattgtagttttaccagaaaaactagatcctgatgaatacgtcaaaaaatatggcgctgagaagtatctggaagaagtcaaaggtgccttaacgccgactgactttttcttaaaacggttggaacaaaaatataacttagataatgaccgtgaaaagattgcttatttaggtgaggccgtaaaagaaattgcacaagtgcgcaatccagttgagcaagatatgtatactgaaaaattggcgaagtctagtggggtttctattgcttcgttaaaggcaaatcttgctaaagaaagacggcgaaataatcgggcacgcaatcatgtacgtaattctcaaagaaattcacctgattatccgatagacgtacctttacctggtgatgaagacgtgcctacagagcagtcagtagttgaaaaaaatcctagtcagaccagactcttgtatttatttattcattcaactgatgctcaaaaatatatgttagaagggcaatttcattttcctaatcaggattttgaaactctggcacaggattggttaaaatatgcggaaactcatgaaaatccacaaattgatgggttcttagattttattcctgagcaacttcaaggtataatagtagatgctgaaatggcacagatgccaaaagattctacaattcaagaagttgatgctttggttctagcattaaaaagacgcaacatctattccaggctgaatgagcttcaagctcaattacaggatgctaagcgcaaaaatgatgcacaaggaattattgcaatcactcaggagattattggattaaaacggatcttaggttaataaggaggctttttagtggcagaaaaagaaactacacaaaaactatctttggataagatggttaagcaagtcgtaaaagacgtaaagaaagataagtcgatcactgaagaagatttcactgctcgtttgattaagccttataacttacaaggcaaggctgtagatcaactagtacaagagtttgaagataatggtattagcattgttgatgaaaacggtgatccttcaaagttagccttaaagaaacaaaaggatgttgaaaaggctgaattaaaggatatgtctgctccatcaagcgtacgcatgaacgatccagtgcggatgtatttgaaggaaattggtcgtgtaccacttcttactgctgatcaagaaattgctcttgccaaaagaattgaatccggggatgaagaggcaaagcaagaattagccgaagccaaccttcgtttggtagtttctattgctaagcgttatgtaggacgtggtatgtcattccttgatttgattcaagaaggtaatatgggactaatgaaagctgttgataagtttgattatcgtctaggctttaagttctcaacctacgcaacttggtggattagacaggcaattactcgtgcgatcgctgaccaagcacgtacaattagaattcctgttcacatggtcgaaacaattaataaattgatcaggatacaacgtcaattgttacaggacttaggccgtgaacctacaccagaagaaattggtgcagaaatgaatatgccaaccaataaagtacgtgatattctaaaaattgctcaagaacctgtttcattagaaacacctattggcgaagaggatgattcacacttaggcgactttattgaggataaggatgcaactagtccagaacaacacgcttcttacgaaatgttgaaggaacaacttgaacaagtacttgagactttaactgatcgtgaggaaaatgttttgcgtttgcgttttggtcttgatgatggtcgtacccgtactttggaagaagtaggcaaggtatttggtgttaccagagaacgtattcgtcagattgaagctaaggcattacgtaagttgcgtcatccaagtcgctcaaatcaattacgtgatttcatggattaattataattatctatattaaaagagctaagtttgatacaatcccactaaagtggacgatttaaatacataaagtattcaattatccatggaggtgggattttttatgtccagaaaaagtaaatattcattcgatcaaaagatatgggcagttgaacaatacttgaatggtaataggagcagcgttgaaatagctaaacggcttaagatgccaagtaaaagtggagcgatgcaagtaagaagatgggttcatcaatatcaaagcaatcgtgatacccttctaagtaatgctcaatacaataatcattactctaaggcatttaaagaaaaggttgttcaagaatatttagctggcaaaatgtcgttaccttctttagctaataaatatggcattagaagcaatggaacagtatcagaatgggtttccaagtataatagtcatatagaaaatcgggactatgatccccatccggaggtctatatgactaaagcaagaagaaaaactacccagcaagaaagaattcagattgttcaatactgtcttaatcacgacaagaattacactcaaacagctgtcaaatttgattgttcttaccagcaggtttacagctggacacacaaatatctagctaatggtgaaacaggattaacagataaacgaggcagacataagaagccagaagagctaactgagttagaactggctaatcgaaaaattaaggaattagagcgtcagctcaaagaagaacaaactaagaacgaattcctaaaaaaattagatcagttagaaaggatgtgcttgccggacaaccaagatacagacaagccgcaataaaaagacgctggaaacaagaaacatatcagttaatccatgactgccatcaaaagtacaattggaagattgatttaatgtgcaaatgggctaaaatagcacgctcagcttattacaaatactttgatcctaagcgcaagccgagtaagcgtgaagaacgagacaaaaagattgaagcaaagatcattgaaataaccaagtctaacaacagtctgtttgggacggaaaagatgaccatggcagttaatcgacagatgtctgatgaaaagccggtttatcataaaactgtttaccgcttgatgtgtatcaatggcattagatcacaaaagcctagataccagaagctaaagttcaagcatacaacgcctgagaaaacggccgaaaacaagttaaaaagagactttaatgcatctagacctaatgaaaaatggtgtacagatatcactgaagtcgttgctgctaacctgcctaaggcatatctatgtactgtgtttgatctatatgatcgctatcctgttggctacgcaattagtaaacgaaacgatactgctttagttcaagcagcctataagcaggctgttaaagcataccctaatgctcatccgcttttccatagtgatcgtggttttcaatttactcgcgcacctttccaaaaccaattaaaagaccaaggcatgacgcaatcaatgtctcgtgttggctgctgtattgataatggtccaatggaaggctggcaaggcattatcaaagaaatgcgagttattcttcatcctcaagtggccagttatgatgaacttaatgattctatttgtaagacaatagattactacattaatgaagatccacagaaacgttttaacggtttaactgctggtgaaatgcgcaaagaagcgatgaaaggcaatattaagaattgccctattgcaccaaatcatcgaattgagaaatactggcaaaaaatacacgaaaagaaaataagagaagccaaaaaatcctcagctgattattaatcaactgaggaataaaagctttatgtaattctactgtctacttgacagggaatgtatcagttttacttagctcttttttattggactggatctttacctgctgcccttagattatcttcaatgattttcattggatttaaccaagtgccattatctttccaatagtatttgcatggcgtattgtcatgctttttatcaatgtaatctttatctgtcttagtaactcctaaatgaatgtgagagccggtcagtttaccaattttttgtcccaacttgactttttgaccttttttaacataaatatcagtaatactgaggaagccttcctggtaaacttcaacatagccatcatcggaaataatccaaatataaagtcctaaacctggggcgtatttaacacgatggacagttcctgcatgcacagcatatacggaagaatgtccaacttcactaaatccgaagtcatagccatcatgaaaataactcttgctaggatagactcgacgaatgacgtcagtttcaccaaacttttgtccagatttaaatttgattttcttttcatagagcttcttaaaagggtaaccccaagtaagatgaacgacttttttctttttagcagtcttctttttcttaaccgtgtgagtttgtggtcgtaaactattcagattgttttgccataagggaatagaggcaaaagctaaaatagcaattaaagcagctaaaagtgcaaacttactttcagtttttttcattaaaatagctcatctcgctttccgtcaagcatatgttcactaattgtttgttcaaaaaatactggtaaatcatgatcaaaattgtaagctaacttttgctttttcaattctttagcactcatccaggttagtttaccttcgtctgattctttaacggtacccgaaaattgttcagctatgtagaaaaatactaaataacgttcatcattgtgatcataaaattgtttaacaccaactaattgaggatgactaatcgttaatccagtttcttctttgacttccctgacgacagaatcatgaaaagattcatgcgcttcaacatgaccaccaggaaaagtaagtcctggccagaccggatcgttgcgatcaagaactaaaacctgatctttgtttttaaccatgcacatattagttaatgtgacattttctgttctactcatgtaaaaaacccgctttctgtgacgattatatcaaatagtagcaaaataagactatgaaatatgctaaaatttggttaaccatatcttttatggaggaaacatgaatttaagattaaatacgttggcaaagatggtagatcctggcagtcgagtggctgatattggaactgatcatgcatacttgccaattgaattagtaaaaaatggcaaaattgattatgcaattgctagtgacgttgcagagggccctcttgaaaatgctaaaaatgatattgcagcagctgggttaaccgagcaaattgaaactcgcttaggtagtgggttagaaaccgttactcatgctgatcagattgatacagttgtgattgccggaatgggcggcaagttaatgactgatattcttgatagagcttggagcaaagatgcacaatttaaaactctggtactagaacctaatataggcgaagcaggggtacgtaattggctgatgatgcataattataagattatctcagaaaaattaattgcagaggctgggcatacttatgaattaattaaggctagcttaactgaagaaaagcatgagatgactgaaaaggaaatcttttttggcccctttattgtacaagaaaagaatccagttttttatcagaaatgggaaggccaactcgcttattatcaaagattcctggttaatttgaataaagcaagaaaaaaagacgaagatcgaatcaatgaagtagatcatgatattaaattaatcaaggaggaattggagaaatgaccaaagtaaaagacattgttgcgcgtttgcgacaagattttccggaaaacattgcttcacaaggtgatcctgttggtatgcaaattggatcaatggaggctgatgttaccaaagtaatgactactttagatgtacgtccccaggtagttgaagaagctgttgaaaaaggggttgatttcatcgttagtcaccatcctgtaatgtttagaccagcacaaaatttggattttgcgaatgcacaaaacgcaatgtatggcaatattatcaagaatggaattactgtttattcaattcatactaattcagataaagcccaagatggatctgctgattggcaagcagaggaactaggtctgcaagatgttgaaccattttgtctggatgatgatggaattgctatgggtagaaaaggaaagttacctagaacaatgactgcttatgattttgcctattatgttaaagaaaaaatgcaaattaaaatggcacgtctgattactgcaaacaatgaaaagccaattaccagtgtaggatttatttgtggggatggtggtaaatattggactagagccttagatgaccatttagatgcttttattactggggatgtttattatcatgtaggccatgatatgatttcatctggtttaactgttgttgatcctggtcattatactgaaaaactatttaagtacaaggtctatggtcgacttaaaaagtggaatgaagaaaataactggaatgttggaattgagctttccgaggtttctactaatccatttcaagacttattttaattagaaagagagttatatatggaatatcctaatttgttacctagatttttaaagtacgttaaagttaattcgcgttctgacgaacattcagatcgctttccatcaactgaaagagaagaaaacttccaaaagaatgttattatgaaagatttggaagaattaggtttaagtgacattcactacaatcaaaatgctggtagtgtaatcgctgaaattccgtcaaatgttgattatgatgttccagtaatgggctttttagctcatagtgatacggcagactttaattcagaaaatgttaaaccacagattcatgaaaattatgatggcgaaagcaaaattcaattgggagattcagagttttatcttgatcctaaagtttttccacatttgaagaattataaaggacaaacaattattacggcctcaggtgataccttacttggtggggatgacaagtgtggtgtgtcagaattaatgacttttgcggaatatttaatgaatcatccagaaattaagcatggtaagattcgattggcctttactcccgatgaagaaattggtactggtgctgaacactttgatgttgaagactttggtgctgactttgcttttactgttgatggtgaagctcctggtaagttagattgggggtacattctctgcggcacaatttagtcttgatattcagggagttaatgttcacccagctgttgctaaggggcaaatgattaatgcaattcaagttggaattgactttcataatcaactgccagaacacgatcgcccagaacataccgatggacgcgaaggtttcttccatctaatgaattttgctggtactgttgataatgctcacttagattacattattcgtgattttgaacgtgatgggcttgaagagcggaagaatttggttaagtcaatcgttaagaaaatgaatgatgaattcggtactgaacgaattacacttaaaatgtgggaccaatattacaacatggccgatgaattaaagaaacatatggacatcgttgacttagcgcgcgatgcttataaagcagaaggtcttgaagtcaatgaagacccggttcgtggtggtacagatggctcacaattgacttatatgggcttaccatgtcctaatatttttgccggagaagaaaacatgcatggtcgttatgaatacacagttcttgagtctatgtggaaagctgttgacgtgataatcaaaatggctgaattaaatgctgaaagagctaagtaagtgaaacatttttgactaaaaatatcaataattctatttctgatctaatatgagattattgatagattaggaaatagggtaagcatagttaataaataaaaattatgcactaatactattaaaaataaaagatagtttataattaccgtcattataggattatagactatctttttgttgtacttttaacttttatgaacttgtgaaacaaagtgattaaacttagcccttgcaaaaagtgactaaagtaagtattatagttagtgtaatagattaataatacagtacaaaataggagctgagtaaatggaatttaaagataatattcctatttatcttcagattgaacaatacttgtatcgtcaaattgctttaggcaagttaacagctggtgagaagattccttctgttagaaaacttgctctagaattaaccgttaatgttaataccgtgcaaagagcactacaacagatgaacagtcaaggtattctttatactaaacgtggcgaaggtaattttgttactgaagatactaaactattatccgaaaccaagcagtcattaattaataatgaattagaacagtttgttcaaaatatggaagagtttggaataggaaagaacgagttagtttcaacgttagagaattatttaaaaaatggtggggatcagaatgaatgatttattagctattaaagatgtaagttataagaaaaatcagaagcaagtattgcaagatgtgaacttgaatttagctcctggcaagattgttgcgttacttggtgaaaatggtgctggtaagaccactttgatgcgaattattgccggtgtagctaagaattacaaaggcgaaattaatttagagggggcaacaaaagaggcagaaagaaaggctaagttgtcttttactgatggtttaactggcttcagcgattcaacaaagatcaaggaagtggttaaattttacgcaacgatttttcaagattttgatgagaatgaattcgatgagctgcgtaagtttatgaaattagatcctgaaatgaagttgagtcagttatcacgaggaatgcgtgaaaaattgattattgctttaacatttgctcgtaaagcagatttgtatttacttgatgaaccttttggtgggattgatgcaatggctcgaaagaaaattattaattccatcattttgtggaaagatgaaaaggcaacgattttaatctcagatcactttgtcaatgaaatttcatcattgcttgatgaagtggttattgtaaaagatcataccgttttggaacacaagtcagcagatgacattcgtcaaacgcataagtcaatcgaagaatactatgaaagtttttatgcagatgaggatgatgaataatgactagttttaacacattgtttaatcgaatgtttcaagaaaaaagcaagtcagtctatttaatcttcttaattcaagcctttgctagtttatgttttacaattattggttttgtttcggaaaatggtacaccagaatttgttaatggaaaagatactagttctgtcaatgtgattgttgcttttctcgctgtatttgcagtaatgatgctgataacgtcatttatcgctgattttgtttattggattatttcttcaatcaagaatgaaaaaattaatcgcagtcaaacttggcgcttgattccggtaactgatactaagtttttgcttagcaattttgggacagcatttttaacttatatttggttaggaattttagaagcggtcacgataatcgttacccttttgccgatgttgtctgatcaagatgtgcgcaaagcaataggtcaggctagcatccatctttcagcaagagactggcaaacaatgctcggaagtttgctgctaatcatttttattggctatgcttggtacgcaattgtaagtttgcttaacctagcaagccgcagcattattgattttttgccaggtggctcaagtaaagtatggacctttattattagagtaattgtaattattgcgattatttggattttaggccatgcggcaacaattatcttttcagtcttaggaaagtttagtccttttatggtcaacagccaggatattaactatgccactacgattcttcaattcttggtctttgatgttgtgattactttgatcgatatcttgcttttgaataaattcgtagaagcaaaacagaattaggagttttttatggcaaattttaagaccttgtttaagcaaatgtttgtgcaaaaaaggcgctacgctaacttagttttgttattacaagtttttgcagtcctttttttgctggtaatggctctgttagataaaagcaatttagcttatctcaacattagtaaggacagtaattggctagatcgtttgcttagtgcaggaatgctcgaaacgccgattgccgatgtgatttttgttggtctgctttgctggcaaaatgaaaaaatcaacctcagtcaaacttggcagctagctccagcttcaagtgtcaaaatctggctgattaatatgctttctagtttagttgaatgtatttatatttttgtaattcaagtcattttaggcttcgttgctgctatgattgataatttaagtcatcattattcactgcttcatgacttagttgatgctaaagttacttgggcagatgctagtttattaattgaatttctattgttcttaactggaacggttttagttattatgacttttgtcagttttgctaattttttgacgaaagtaattgttgatcaattgccagttaacaataatattgtcattaagttatttgtgatggcagtgattgtgattattgcaatcttgattgctgaacagctaaacgaacaaattactgctatgtatttgcatcgttttgccaaagaagcagcatatgatccattgggtatttcagtggttgagtactttgcaggagcaattgttttaggagcaatcgacagctacttaatgagtaaatttgtcgaacctaagataattaatcgttaattgaaggggaggggtagatagtgacgaatttttggaccttgtttaggcaaatgtggacgcaaaaaagaaaatttatttatttggttttcttaattaatatctttgctgtagtatttttatcaggttattttcttcttttcaaaaattggaatggtctagcaaatctgccgtctaaaaatttagggcaattctggcgcaataattttgtctatgtgactttatacattgattttgccttttgtgcgattacatgttggcaaaatgaaaaaattaatctgagtcaaacctggcatttagcagctagcgatgaacgaaaaacatacttagctaatatatttagcagtttgctggcatgtggttatttcttcttgctgcaagaaatcgttaatagtctgttgctgatccctagttgcggggcagacagttttgctcaagcatttcgtgagtttggtctgtatccaattaaaacagttcccggcgttgaaataactagcaatcgaatgcttgcttttcattggttgtttatcattttgataattttaatcatttacttctttgtcagctttgccaattttagttcgcgagtaattactgatttcttgccgtttaagagtacagtttgggctcgcttgttaattatcgcaattttggtaattgtcgcagcttactgcggcatgatctttatgtctaagttacagggctttgttgataagagtccaaatttacaagcaaccgatccaatctggttagatgatttatgcttgtttattgttagccttgttttcggtattttgaatctagtattcgtgaagaaatatcttgaaccaaaaatagattaattaatgcaaaaaaagagcttcatttcaatcaagaaatgaagctcttttttgtagttaactaagcatttgctgacatgtaatcataaagctgatttacttcttcggctgtgaattgtccatcgccaactttcatggcgtgaactttttcaactgagaggtgactagcaaaggctaggtcagtgtcattaacatggtgttttacttgaaaattgataattgcatcagataattcttcttgctcattcataataatttctccttaccctctaattttaatcaaattggaataaaaaataaaattttcccggatttaaaattgaagtgcaacactaagtgttaaacaaaaaggccatgaagacctaaacttgaagtgacgaaaaatcaagaaaggaagatctttatgaccaattcaaattctagcatttctaagcactatcatcaattaaccagcgtacaacgtggacaaattcaagcaatgctggattccggcataacttcccgtactgttatcgctcaagaagtcggctgccataagtcgacaatcagtcgcgaaatcaaacgcggaagtgtcctgcaaagagacagcagctatttattgtatgagcactattacgctgatactgcacagatttattatgagaagcgtcgcaaaaactgctatcagcgcaatccattgaagcattatgctgtctttttgagaatgctctccagacgctttaaagctaaatttgatgccaccagcatcgatgagttcgttggtgaattcaaaaggactatgccaggctacccttgtcccagcacaccaactgtctatcgctatattgatcagggcttgctggacataagcaatattgatctgcctatgaagctcaaaagacgcaggaacaagcgtcatcacagccatggcggtcacgctttgcacaagaagcatcttggcaattccattgaacagcgtcctaaagagattgaagacagaaaagctccgctgcactgggaaggagatctggttaaaggcgtcagacgcaagaatcagcctgctttaatgactttgactgaaagaaccacacgctttgaagtagttatcaagattcctgactatcgggcaagcacatgccaaaggctgcttcaaaaggagattgacagacatcctgcctggtttaaatcaatcacgtttgacaatggctctgagtttgcggatatgaccaagatcaagggctgccagatttactttgctcacccatattctccatgggaaaggggcaccaatgagaactgcaatggtcttttgcgtcaattcttccctaagggcaagagcatgaaagacaagtcaaaagcttatgttcaacaggcaactgatgccattaaccacaaatatcgccgaatcctccaatatcacacagcagaagaactcttcaagcaatatatttcctcatagcctaactgttgcacttaatttgacaattcaggaaaataaaattttttgcaatttcattgattaaaatgttttccattgcgtaaatggccaatacctgaagacgactcggccaactaatgcgctgcgcttaacaaaaccgaagtaacgtgaatctttggaaacatcgcggtgatctcccatgacgaagtaactatccttaggtactcgcttttttaaagtgaaattgttagtatagagttcacctaatttatgtgactttctttggtagccattatttaaatatggttctgcaatttgtttgccgttaatgtaaagcttatcatttttagaagtaaccatatcaccaggtgtaccaataattcgcttgatatacagagcacctttttggtctggtgcttttagaatgacgatatcatttcgtttaggcgtaaaatgacgtacagcaatcaaacgatcgccattctcaaatgtgggctgcattgatggaccagatactgtttcatttgataggaaaaaactaaaaataaagtagtaaattcccatcaaaattgcaaacataataattatgtctaaaacaaagcggccaatgctttcatcatcatttctctttttggtttcaaccatagaatatctcctttgcttgctagtcttattataactgaattctccgccgttgaatggtaaaatcatattaaggtgtttaagtatgacaaaatttttgacgaaattaacaaaattagagcaagagataaatcatactgcggttaaacgacaagttgaagaaatagcattaattgatagttatgtacaagcaggtaagccattgaagcgggcaccacgcagattaggtttattgccagatgaatttgaagaagttttagttgaggtgggaccagataaagaaggggccttaagggatttaaataatttacttaataattttcggcaatatctctctttaatatatggcatctggtctctgcctaatattcagactgcgcagttaattaaaaataagctgcatgtacaaacagcgttagaaatcatggcaggcaacgcgtattggtctcaagctttgactcaggttggaattaaagttcacagtacagactcattagagtgggccaagacgtcgaccactggagctaagcctttttatccagtagaagatttaccagctgaccaagcaattaagaagtatcacacagttaatctagttctatgttcgtggtcaccaaatttcggtcacggagatttagaaactgtggcagcttggcataagtataatccaagttgtcatttgctctttgttggtgaaaaagatggtgctactaattcaccagaattttggcaccaaaattggtttaaaaatagtgcagctttagacgagattaatcattccttgcaaagcttcgattttattaatgaacaggtatttgaaataaaaaatgaattttaaaaagatatttttgttactgattcttttattatcttttttaggaattggaacaatgctctccaatattgaatctaattatgctgacgaattgctggaagcacacggcttaactaataatacccgctattttagaacagatagtgatgataagattagtactttcctaaaatatttggacaaaaattatgcgaatcatcaaattcaactgcatctagataataattatgaaaaaaaacaagtgcttgtttgggctaatcatgccgttactggcttgccaactgagagtggtcgctatttttcgcctgatgattttaaaggacaggtttcttttgtggtgctggggccaacagttaaacttaatttattagatgtgcagaataataaatatgttattttaggcaaaaattattattctgttataggcgaatttaaggactatccacaggtagaaatggataaatattatctaagtacaggaattgatcagccaactgctaaagaccagctcaagaattatcgaattgtagtagatgcaacacctgcagtgattgaaaagattgctaagcattatcatgctagtttgcatattccgtcttttgttcaagagcatcatcgagatcgtttatctgtcgtgccggatattttaatgttagttgtttgcctattggtcggaatgatcacaaatatgttgcttgcaataggaattaagcgtcaggctcgtttaacacgtctacacgatgatttgctgcgcaattgggtaattaaccgcagcgtacgtttatttttaatagaggctatttttgcccttgctacatacttctttttaagatggcatgccttttattcaacatatggttctttaatagttacattaatagcttcctgggttgtaattgtattggcgttttgtgggatggtctattacttagtgagaaaggacaggaaaattgctaaatctaccaaatgaatttaaaactaaatatgaaaaattattaggtaccaaaaaagcacaagaactatttgcggcgatgaatgaagagagcaaaaaagcttttagaattaatacattgaagcctactaaggtttcatatgagcttactgattcagtaccgcaaataaattcagcctattatggtgaagtatcgggggaagatcctgagtgggtaagcggtagtgtttattctcaagatccagcggctatgtttcctgcggcaattagtggtgttcggccaggagagcgcgtgctagatctgtgtgctgcgcctggaggaaaaacaacagcattaggagaacaattgaagggtgagggccttttagtagctaatgaaatctctgcaacacgagtaaaggcactacgggaaaatattgaacgttggggcatcagtaatgccttaattactaatgaaagtccagaaaagttagttccaattttttcggaattttttgatgtgattttagtcgatgctccatgtagtggtgaaggaatgtttagaaaaaatccggaggcaattgattattggtctcaagactatgttttaacatgccagaaccgtcaaaaagagatcctcaatgaagctgttaagatgcttcaacctggcggacgcttaatttattcaacttgtacctttgcaccagaagaggatgagcagattgttagctggttaaataaagaatatggttttacaattttagatacagggatacaaactaataagattgatgttggacagcctgagtgggctgatggaaatcctgatttgactaaaacattacgcttttggcctcaagatggtataggtgaaggacaatttgtggcagttttacaaaaagtaggtaaagctagaattgaaaaaaagagcaaaaacaaaaaagccaagcgtgatccgtggcgcttaaccaaaaatgatcaggaactagttggtcaggtaatggatcagtttaatttaccagttgctttaagtgactggcgtaataaagcaaaagtccgtaatgaacatgtctatattcctgcaatcagtttgcctgaaaaaagtaagcttcatgtaattaataatggagtcgagttgggtatattaaagaaaaaacgttttgaaccaggacatcaattggcagaagtgctaggtaaggtaaagcaagaacgggtttatgatttaccgacaattgaagaataccaaaattatttgcacggtgaaaccgttaaagtggacagtgatttgcggggctttgtgttagtcagctatcaaaaattaatatttagttttggcaaaatcgctggtaatcaagtattgaagaacttttacccaaagggattgagaaaatgataaaactaattgcgacagatatggacggaacctggttaactgaccagaaagactatgataaagaattatttttgcgtgaatttgcggaaatgcaaaagcaggggattaaatttgtagttgctagtggcaatcaatatgctaacttaatgactcgttttcctgaggttttggataaaatttattttgtagctgaaaatggggcattagttgctcaaggaagacaaattttgcatgttgactcgttaagtgatgacatatatcaaactttattaaaaataactactgaatatccatatccagctgtagtgatggggctagtaagtgcttatgttaaaaagagcagtggacgagcttataaacaagaaatgaaaaaatacatggagcatattactgtagtagattcttttggagaaattgatgatcagattttcaaggtcagtctgacagtgccagaagataaaatgtctaaaattttgcgcgaattaaaagaaaaatatccggaggttggttttgtttctggtgcagcagactcgattgatatgcaaactaagggaatgaataaggcagtaggtctagcatatttgagtcaaaaattagggatcaaatcaagtgagatgatagcttttggcgatagcggtaatgatgtaggaatgctgaaatatgtaggccgtagttttgctactgcaacggcgttgccagaagccaaacaagctgcagggcaaattattggttcaagtaatgaaagtgctgttcaaaaagaaattgctaaattgcttgaaattaaataaggaaaattatgtaaagtaaaagcactagtaatcattaactagtgcttttactttacagtaactgatcgatttgagcctttaatggtaaattatagtatttttttatttgtaccagggatgctaaatcttttttgccgtaaacagcaattaaagcagccaattcatttttccaattagtaattaattgctctaatccagtactaccattttggatgtattcttgtaaaaaaacatttgaaataccaacaaattttcctcctagagctaaaccttttaaaatatctaggggattacgtactccaccagaaacataaaatttaacttgctcttgccatgccatcagagcagtcaccacagtaggtaaacctaaatcttctaagtatgaaacgtcactggcattacgtgcattctcaatctgggcaaagtttgtgccacccgaaccggcgacatcgaagtattcaatgccatttacttttaaaagatgaatacttgtttgatccaatccaaaaccgacttctttaataataatgggcaaatcgatagcggtacgaattgctttaattgaatcaagccaacgaaagtcacgatcaccttcaggcatggcaatttcttgtattgtatttaaatggatctgaagcgcatctgcatttaattcttggataatttgtttaattgcagagattggtgtttctggattaacattaacaattagtacaccatctggatcttctgctctggcaaccataaaactgtctagttgatcagtttccttagctaaaatgctggcagatcccaaagctagggcaatattttgctgctgggcaacctgtcccaatgcttgattaatttgtttagaagcagctgagccaccagtcatagcattgataaaaaaaggcgcagaaacatttttgccaaacatttctgatcccagaatagttggatcgacttttgtttcaggcagagcagggcgcaacaaatgcagttgatcaaaactattatatttttctttattaaaaaacatctgagctaacttcagatgttcttcttttctttcagatctaatcgacatagaactctccatcaatgagccatgataatctggtgaaccttaaaattaagaggcataattccattatggcgccattcgctttcaagtgcttcaacatcggtattagcatctgtaatcacaatgccacagtcaccattaccagcaccagaagttttagcagctccaccaaaattttctgcaattttgattaattgcgataaacgtggaatttcaatggcaatttggttaattttggcaaagtgctgcaacaatttacggttagcccgaatttgttgtttgattaaagcaatattgtttgcttcgaaaccttgaaccatctttaaaacacaagctctagaagctgctaagaaatttttatattccatattcaaagccgccttattagcgttagtttcatcaacgaggcgtgaagttgatgctggcttttgactccaaccaatcatcagtttcatatctttaggaggagttagtaattcaacttttaagccaggccaagcttcattaacgacttgaactaaagtcttattagctaattcttgctttaaccattttttgtcaaaagtttggtaagctaaccagccgccatagacactagctgcaatgtcaccagctgagccatttccttgaactgaatagtgtgaaatagccgataatttataaaccagttcattgctcatttttacgccataaaaacgcaagatagctttaactgtagctactgtgacggctgcacttgaacctaaaccatattttttaccatctgcagaatctaagtctgaattgacgtgtaaatcatagactttcatcttgatattttgctcaatacaatattgttcagtaaatgaaatagctgacaaaatatattcaaaagggttgtcacgattatcgattaccatttttgagccctgacgaacccaatgaatcgaatcctgtgagtattgcttggagtgaattaagccagttgcccctttactcttagtgattgacacacgtacaaattggttaactgctactaaaatagcaggacaatcttgctctaatactgcatattctccggcaatatataactttccgggcgctttttctgttatcaaaagaactaaatcctcgaatctaattaacttttttaattacaactagtccaaataagtaattccaggaccaaaacttgcattcactatattaacattattaaattcggacgaaaagcgttgaatgatatctttgctatttcttaattggcaaagtaccttaatatttggtcctgcatcaattgtatagtaacattcaattccttcagtacgaagttgttcaactaatttaatagcttgaatggtttgcggctcaaagtaagtgaattcaggctgtgcagttaaattaattgcatgcatttcatttgcatttaactcagctaactggcctagggcagtgaaatcattactttttatagctttgatcatttcatttaattctgaattgttgcgttcaagccagggcctgaaaaatggagaagattgggcatctttcataccataagtcgaagaaatctttttttgtttggtatttaattcaactgctaaaaggtgaagatccatcgttggtgtttcatctagtgcatatgcgtaagatgtttcgtcgctattacctttttgccaaacagcaaaaccgccataaacggagcggctggcagaaccagatccaatcctggctaaacgagataaatcttctagatcaatgttgatgtcatagcattgacaaaaagcagcagctagtgccgcaaaagcagaactagatgatgctaatcctgcagaagtagggacgtgattgacagatttaacgattaaattgccagtgacgtgaaaacgagcctgcaatttttttagataagcaaaaacacgttgactagctgcagcagtttgctgttgattatttaagaaaaattgattttcaccatctgttttttcaacgctagtatcagtataaaaagcatctaaagtcattgataaactagacattaaaggaagacgtaatttgtcgtcagctttgccccagtacttgattaaagcaatgtttgtatgtgctcgtgcggttctattcattaaatctcctcaatccagtagtcactaattaaatctttacatttagaggcaatttcttgggcgacagtttcgttatcgcacaaggaaatagtaatgccgccaagacctccgcctgataatttaaagcctaaagcgttatttgacaaggcaattttttgcagttggtcaattttatttgttgaaagatcaaatgagtgcaaaatttcttgtgcttcattaaaaatctgtccaactgcttgacgatcgtgcttgatccaagcttttttagtaagatccgctaattcacccaagcgagctatttttttcttggcatagtcggacttttcaagcatttttttaactaaaaaaacagcttcctttgtattgcctagttgaccagtatccatgattaacagggtagctcctaatttggtttgtaatattttaggccccatttttttattaaaaaaaactagataatctgaattaacagtggctgcatcaagaccagaagctttaccatgattgatcatttcagcatgattagttacagtcataatttctttttcagtcatattcagctgaaagaattggttcattgccctagtggtacctaatgcaacagtagcacttgaaccaaaaccacgttccattggaatttcaccagtgtatgtaattttaagtggatggttattgccagccttttttttcatatgtttaactacgtattttaggccatcatattctgccggtgcttcaaataatggaccgtggtagcgagcggtatccatccacatttgagaagcagattcaacagtagttttaatgtgtaaagccttaattggcatagctaaagcatcatatccataaactactgaatgctccccaataataattaccttgccatgagctaaatagctgcttttcatttttaatcatccttaaactagatttatacaaaagattgcccttgctatgataaaataaaaagcaaggagtgcgaacaaatgatcaaaattcttacaggacgacaaaccgacccattacaagaaaaaattctggaagaagcagttgaaaactatcagcaacacccagaacaagaaacttttatcatcgttcctaatcatattaagtttaccacagaagttagggcaattaacaaattagcaacaagcaaacaacaaactgagactgcagttaaaaatttgcatgttttgtctttttcgcgtttagcttggtttttcttaaaagatgccgagcaaggattgcctaatcaactagatgatgcagctagtgcaatgctcttagctcatattattgagaacaaaaaagatgaattgactatttttgaaaatgttaatgttaattctggattagtaaatcagctttatcagacaattttgcaagtctatgacggaaatttagatttagacgagatatcagaggataatttagatcaagaaactaaaaataaattacatgatttgcggattatctatgatgcctttattaaagaaattgcgggtaaattctctactaagaatgaggttcagctgcaactaaatgaaattttagctaaaagtaaaaatttaaagcaagccagtttttatttctgtgatttttcacatttttcattacaggaaacactaacgattaaaattttgatgcgtaaagcaaaagatgtaatccttgcatttaaaacgcgcttaggtgaaattaattctagtgcggaagaaggagattatgattatgtaatccagcaaactattaagcgcttaacgctgttcttacaagagagaaagatggactacgtgacagcaacttttccgcttaattcgcaatcaaatggtcgtgaaatattaaatagtctttggacggagacaattcctaaagttgacgaattgaagcaggtacaattagttaaagcagactctcgatatgcagaggcttattttgtagcgcggactatttatcaacaggtagcactaagcaactatcgctatcatgattttttgattttagctccaaatttaaaggaatacgagacttatttgacgccaattttacgtcaaaatcagattccattttttaatgatttacaacaggaaatgaagtatcatcctctggttgttttaattgaaagcttatttaacttacatgagaatccgtttcaaacacaaaatatgctagccatcctaaagacacacttgttaataccttcttggtataaggaagaggcggagtatattcatgatgttgatgaactagagaattttgttctggctcatggtattaatcataatttatggaaaaaacactttgataattttgtgaatgctgaagtgatccgcttagacaaaatggatgatgaagtagctaagatcgatcgtttgcgcagctacttggttgataagatttcaacatttttcaaaataatagagcaagaaaaagatagtcaaaaggcgttaacgatattttttgagttcttaactaagaacggaattgccgaccgattagaaaaatggcgtgatgaggccaatgaagccggtgatttacagcaggcgcagcaaccagagcaattatgggatttattaatgcagctgttgcaagactatttagcaattaatcctgaaacttttgatttaaatgaattctttaatatgttaattagcgctttccgagaagcaaatttttcccaaattccttcaacacttgatgcggtaaacctttctgaaatggggatggtacaaactagcggctataagcaagtgtttatcattggcgctactgctaataatttaccccaaattcagaaaatgccaggttttttaactactgaaaacttgaatcagctacaaaatagttttaattcagaatcttacttagaagatagtcaacagcttaataacttagaccaaaattatcagtttggtttgtcgctagctttagcacaagatagggtatatgtatcttatccagtacttaatgcttcaaatgaagagcttgatccttcaatttattatcaacgtttaaaggattatggtgctcagcaatttgttcaacatgatttgccagaaaagatgcaggatcttttgtctttcattactaaccctgatgcaagtttaggctatttaacctatatgaattcaataaattcaggtcttgctgtgcaagagttattaaaaatcacacaggagcaactacctcaaaaaacgaagacagtgcttgaagcaagtgattttgataaccagccagaaaatattggtcaggacttggctagtcaattgtatggtcaaaacttgaattcatctgtgtcacaactggaaactttttatgaaaattcatatgaatatttcttgaattatgggcttaagctgcggcgacggtttgaaaatgaatttgatgttattcaggctggaaactattttcacgagacttttgaccgtttagtgaaaaaactaaacaagcagcataccgacttagcagatttaagcagcatagaactggaacaaatgcttaattcggtgcgaaatgtgatgaaggatgaaggaaaatattctcaattaatgaatgatccttttaatcaatatcttttcaagtgtctagaccatactacttctaaggtagctcataattggcggcgctccttgaaggaaaccccgttacgggctaagtattctgaattaagttttgggttaggtgaaaaaatcaaaggattaagcttaaaagtgccagatatatcaggtcaacataaagttgatttgcgcggtaaaatggaccgggttgatttggccaatttcaatgataaggatcaagttttagcccaggttattgattacaagtcatcagctaaaaaatttgatcttgggatgttttataacggaattgctttacagatggtttcttatttggatgttttgactaaaaatgatcaattttttgctggaaaagatcgtctttcattattgggtgctttttatcaaactgttactagacaattagaacgtttgaatagcaataaactaattgatagtagtttaaatttgaaaaagggagcaactgatagtaagcccaagctgatgtatactggcttaatcagcaatgatccagaaatcttagtagaagctgagccattacttgatgatcatcctagctattcttctgaactgtatactggggttaaaactaaggctagaggtggctttagcttgccacgtgaccgcaactttagtgaggaagaaattgaattactgctagaatacgatgagtatcttattcgacaagcatcaagccaaattttatctggaaaaattgaacttaatccatatcgttatggcaaagcgaagaatgccttaacttattctgattatcgtgatgtcttcttttttgatgcgatgctgcgtcaaaatcaatatcatgaaataaacaatctgaataaaaaagaattaattcttaaaatcaaagagaaattaggaaaggaacaataaaattgtctcaatttactaaagagcaacaacaagcaattgatgatcgtggtcatgatattctggtttctgcttctgcgggtagtggtaagacaactgttcttgttgagcgcgttttaagggagattctttcgggaacccaagttgatgaattattagtaattacatttaccaaagcagcagctgaagaaatgaaaactagaattaaacaggcattatcagctgaattagcaaagccgggatctaatcgcagatatttacgtgagcagctaaatcaagtggatactgctaatatttctacaattgatgcattttgtctagaagtaatccatcgcttttattactctgtaaacttagatccaagttttagtattctaactgatgatactcaagctgcattgttaaaagaacgtgcattacgtgaaattgaaggggagtttctagaaaagaaagacgtaaattttaggcatttttatgataactttgcaggggatagagatgcggatagtccgcgcgacttgttgctggatttgtatgattttgccatggccaaacctgagtatcgctcatggttaaaaaaattggttgatgtttacgtggttaatggcagtatcgtggaatctgatttgtggcaaaaacagattaagccatacttgcttactagtattggcgacttacaagggaaaattaatgattatttagaaaatccagtaatagaaacaaaagagctagctaaggctaaggaagcttttaccttgtttgcacaaaatttagatcattttgtttttgctttagaaaatgatgcagactacgataaacaacgaaaactattacgttcgtgtgtttttacagcgaattatcgtaagtcaagtaaatgggatgaagatgttctaaatttttatgaagacctacaaaagttaaaagatgaagcaaaaaatttggtttttgatacttttacttcattttttgctgttgatgaacaagaacaaattaaagtcatgcagcgcggccaaaagattgttgctgcaattgctaaatccgagctagccttgattgatcggtttaataagctgaagcgcagtgaaaatttgcttgactatagtgatatggaacaattggcttatcagattttgagtcaagatacatcgaattctcaaatggctcgtgaattttatcaaaataaattcaaagagattttgattgatgaatatcaggatattaatgctttgcaagaaaatatcatccagcaaatcaaaaataaagataaaaatacgcttttcatggttggtgatgtaaagcagtcgatctatggctttagacaagcagagccaagcttatttttgaaaaaataccatgattttgccaatgatgataataaacaaaccaaaagaattctgttgtcagataatttccgctctactgagccggttaccaaaattgtaaatcaagtatttaaaagtgtgctaagttcagattttggcgggattgactatcaaaaagaaggacaattaatttttggtgctaagtattatcctgaaaacactcctaaagctagtgaagtaattgttcatgaaaagaaaaatagcagtaatgaagatgaaaatgagatagatttttctgaaattcaaatggttttagcacgtattaagcaactaaaagaagagcgtgtacaaatctttgatagtaaaacaggaatgagagagttacgttacagtgatattgctatcttgactagaagtcgtagtgataatttggaaataatgcaggaatttgctaagcaggatataccattatttgtaactgatgcgaagaattattttcaaacttttgaattgactgttatgatgaactacttaaagatcattgataatcccgatcaggatattccattagtttcagttttacgttcgcctttgtttaattttggtgaaaaggatttagctaaaattcgtatcaagagtaagaactctactttctatagtgcattgacttcttatgtaggtgtaggagatgaattaagtactcgaatcaaagattttttaaatcaactagctgatttgcgcaagtttgccacggcacatcgtatttctgaattgatttggagcatttatgctaggacaaatttattagagataatgaccgcactacctaatggtgaacagcgacgagttaatctagaagctttatatgaacgtgctgcttcatatgagagtgcagggttcaagggattataccaatttatcaattttattaatcggatgcggcaaagtcagaaggacttggcacagcctttattaactaaagaagctggtaatgcggtcagattaatgactattcatggttctaagggactagaatttccgatcgtgttttatgtggggatgcagcataaatatcaaatgcgtgatttaaaaggtaactatgtgattagctcagatagtataggaattacgctccgtgaagaacattatcggattgactctttagttaaagcgatgggaaatgtaactaaaaaaaggcaattattagaagaagaagcgcgaattctttatgtagcattaacgcgggctaagcagaaattaattttggttggcgatgttcctaatctggataaacgagttaaagaatggtcgactgaactaaatcagattggtcaattatcattagcagataagttatcttccactagtccattgagttttatgggacctgcgttggctttagatcgacacctagctgtgaaaatgtctgatattactaattcgttggataagagtcagtcgtttttatatattaattatgaaaatgctaacggtgaactacctgattatcagaaagcggagacaagtaatgataaaacgcaaagtaaccttttaaatcaaaccactaaacggctttatcaatttaattatccgtttaaagatgctagtgaaactacagcttaccaagcggtatctgaaataaaaaaagcattcaacgatccgatcgagaccgaattagagaatgcccacttattgacatcgactaatcgttatttacaaccgattgatactaaacctaatttcttgtatcaaactaagtttactggtgcagaaatcggaactgctacacacatgattttgcagtattatgattatcaaggcaatggtgctgaagatcaactagaagtagaaattcaagaattgattaagcaaaagaaactgaatccagaaattgtttctagtttaaagaaagaccaaattgagtggtttgttcatagcaattttgccgaggaattttggcaaaagccagagaatttaaagcgagaaatagatttttctagtttaatctccgctaaaactttgtttaaaaacttttcagatcctaatgccaaaattttggttcatggtacaattgatggctattttgtcaaaaatgatggtattattttgtttgactacaaaactgaccacgttgatcaatcgcatttatctgaatcaattgaattgattaaagaaaaatatacaggtcagcttagactatatgaacaagctatcaatgaatttagtcaaaaaaaagttattggaaaatatttaattctgcttgatgctaaacaagcggttgaagtgaaatagaggaaggaggaaattatggcaaaaagttttactaaagatacatttgctgtagttgatctagagactacaggaacgcaacgtgagaatgggcatcatattattcagtttgggtgtgctattattaaaaatctcaaggtagttaaaacttattcatttttgatcaatccgcatcgtgaaataccacaatcagttgttaatttaaccggaattcatgatcaagatgtagcaaaacaaagagattttgattattatgcacccaaaattactaaaattttgcaaaatactgttttcgtagctcataatgttgactttgatttgccttttttgaattatgaactagtgcaacatggttatgaggcacttacaaataaagcaattgatactgtagaactggctaagattgcttttccgacttttccatcttataagttgagtgatttgacaacacaattggggattaaacatttagatccacataaggcagattctgatgcttatgggactgcagttttattgcttgaaatttttaataaattagaaagtctacctcaagctacactgaataccctcagttcattatctcatgggcttattcgggatacctcttgggtgattacaacgattgcagataatttacgtcaagaaaaacggcctttaggtaaagaatatatgcaagtgcgtaatattattctgcaaaaacaaaatgataattctgaagcacatggtgggaatgctaaattcccaaagactgactcagagaaacaaaagctatttaaagatcatttacactttcgtagagctcaagtcgacctaattaatcatttgcatcagtttattaatgatccagataaaagggcgatgctaattgaagcacctaacgggactgggaaaactttttcttatctttttgcttatgcttatcagctttattctggtagaaaattagttgtagctacaccaactaaagtgttgcaagaacaagtgattgaacatgaaattccgcagttatttaaggtgactaagttggatttgactgcagaagtagttaagtcaagtagtcgttaccttgaccttgacggatttgtacagacgatttttcaaggtacaccgaataagcaaaccttgatattacagatgcagatactggtttggctgactaagactaaaactggtgatttagatgaattaaatttaactaactataatgcaccactctttgcacagattcaacatccaggggatgcaagagtaggtagccgttttgcaggggtcgatttttggaatttagcgcgtaaacgacaagaagaagcggatatattggtgactaatcatgcttatttggctaaccactatatggatacaatttggggtcagaatccgtatttagtcattgatgaagctcatcgtttcacagacaatgtcgtaagttcgcgtaatgattctttgcgttttgaagctttgtggggagttttaagtcatctccgtaatttgctttatttctcagatgaaagtgttgaagcgcaatttaatgatgatgtgcagctgaaccttttactaaagaaaatagatcctaaaattttggaattaattcagttaattaatgaattacaaaagcaactttattttcaaagagataatgctgttaatcggacagttttagctaatggtaatctagaacttagttttcaaggaaaaagtttatttggcggaaatagcaagtttaaagcgattttacctaagttccaacaaaaattagaagaggttagggacttaactaatcaggttttatttgaattatataatgaacaagaacgcatgctggctaatgttgaggtattagtcaatgagattacggaacaaattgatcgcctagattattactctgaaaagggctatcaattggctgatttgctttctgatcaaaaaggtttagagcaagatggctttattttgatgattactaatcttgatgatccactaagtaccaatttagactggttaatgcttgatgctggtgaagtattaaaacaaatctatagtcgttttgaccatattgccttcgtcagtgctactttaaccagtaatcgaaattttgaatatgcaatcaaccagttagctttaacagaattacatccggttgaatatattggtaaaagtacttttaatataaaaaagcatttacaggtactggcagttaataatatgcctagccctgatagtgaagaatttgaaaagactattgcacaaattttacttagtgacattcaagataagcaccatgtacttgttttgatgactaatttagaaaaaattaaaactgtttttaccatgattatgaatgagccacagctaaaagattttgaaatcttagcccagggattgtctggttccaataaccgaattgctaagaggtttgtaattgctaaaaagtcaattataattggtgctgatagtttttgggagggaattgattttcatgattgtgggattgatactgtttttgcggcaaaaatcccgtttgaatctcctgatcaacctgaagttcgtttaaggcagaagaaattggaagatcagggaatcgattcttttactaaagatagtttaccaagagctgtcattcgttttagacaaggaatgggccgtttaattagaggagaacaggatcatggtcaatttgtaattttagacccaagattatggactaaagattatggtcaagagttccttcaaacgattcctgtcaaagttgaaaaggttactagagaagaattaaaaaagaaattagaaaataaataattatgttacaagatgatacaagacaaacaatcaagtttgtgagttgggtaattggtttgataatagttgcctttctagccagcattgctatctttttctacgtaaagtcaagcataataagaagtttggcttcattttttgtttaaatttcaacttaaacatcttttagtgtcgatttatttttttagttagacacgacaaataagcccagatccatatctgatttttgggcttagcgttataatgtacttgatcaattaattacgactaaagtctttttgattatgtgtggctacgttgtaatcatatggttgatcattgataatcagggcataaatggttctgattagtttatgaattgaagcaatagctatctttttgaaccctttggtttgagaggatagctttttgctttcataataatctgctatatgacacggatttgtcttagctgcattatcaatttgtccaatagctcgataaagcaacttacgtgcgactgcattgccatgtttagtaatacttaaattagagtccatttctcctgactgatatctgcctggatcaattccgataaaagcattgattttattaggattactaaatctgcgtaaatctcctaactctgctaaaactctgacagcagtggtctgtgcaaagcctggaatgctttctaggttttctaaatcatgattaggcaaagacttcgctaacttaaccattcttgcgattaaattttctctttgatcacttaaattaagcaatctgtgtgcataatactgcacttgctcgacttctatgctagagcaagatacaacttgataagcttgataagctaattcaattaatttatctgcagtccttagagcgtgtttaaaagcaatcccctttaagctcattaaccagttaataagctgttttttatcttctcttcttactaagtcacaatgaggatatcgcacaactatttgccagtaatttttacctttagcagaagaaaataaattttcaatttcaggaaaagtcgattgtagagcttggtgaagtcgatttttagctattaccaagtcacttgtcagctggtcatagaagcggctcaaagcattaagctgcttataagtttgggattcgctttgattaaccggatggcgataaagtctttgaattaaagctaaatgataagcatcagttttatcggtcttgttgtagcgtagccccatattcatctcttttttggctttaagcggattaataacaacatattcatagccgtagtcttcaagaaaagcctgcagtctgcgtgaataaacaccggtagcttcaaaaataatttgcggatgtttagaaaaagcggttaattcatgaagcaattgaataaaaccaggacgattattagtaatggttagttcatttttgctttcaccaattagttcacaaacagtagaagtagacttgcttacatcaattccaaaagtaacttgcataataaaaacctccaaaacttagtagtaaaacgtatttacttaagaaatcagatctaattttctaaactcgacatctagtgtccacattcttcgaagagactattgaaaacttaagtaaaactgccagtttattatgcgacatcaagtgtctaaagacctcagggcatatcgttttaccactactttaattctacaaaagaataaaaatagtgaatcaattatcccgtcggataactaattcactatttagcttagaatgtttattatgctggatctagaagtcggggcaatgatcaaaaagttacgcaattggctactagtaaaacaccaattagaaagattcaaaactattatcatttagatcgcggcactagcagctatgctatagcaggcaccaataataagggaaaacaatattactttatttatttgccaaattctaaaaaggcatatctatatcctgcggccaaaggaatcactgaatctaagattaaaaataagtttaaatctatccatacggatgctacaataaataatattaatcttggttggtataagggtgaggtcgtttggaaagtggcctacaaaaaacaaaacggcaatctaggttatactttatatgaattcaaaaatggaaatgatatctcagaagtcgataatttatagaaactttggtattatggaaactgtataattgatgaaaaggtggataggattttatgacagaattgatttcaattaaagattcttctaaacatgttgatgaagaagtcaagatgcatgtttggttaacagataaacgatcaagcggaaagattatctttttgcaattacgtgatggtactgcatttttccaaggggtagtacgtaagaatgatgtatcagaagaagtatttgatgctgctaagtcacttagacaagaagcaagtttttacattactggtactgttcatgaagacgcacgttcacactttggttatgaaattcaaatcactgatttaaaagtggtttcaaacaatgaaggttacccaattggtaataaggaacatggtgttgacttcttacttgatcaccgccacttatggttaagatcaaagaaaccatttgctattatgcaaattagaaataccatgtttaaggctactgtagatttctttgaaaaagaaggctttatcaaatttgatgcacctatctttatgcattcagctccagaaggtactactcaattattccatgtagaatactttgaccacgatgcatatctttcacaatcaggtcaattgtatggtgaagccggtgctatggcttatggtaagatctttacttttggtccaacttttagagcagaagaatcaaagggtcgtcgtcacatgactgaattctggatgatggaaccagaaatggcttggatgcatcaagatgaatcgttagatattcaagaaagatatcttgcctacatggtgaagcaagttctagaaaataatgaatatgaacttaagattcttggtagagatcctgaaaaacttcgcccaactactgaaggtaacttcgttcgtcttccatacgatgatgcaattaaaatgcttcaagatgctggacgtgatattaagtggggcgatgactttggtgctccagatgaaggctatatttcagaacaatatgatcgtccagtcttcattgtcaactatccaacctcaattaagccattctatatgaagaggaatcctgataatcctaaggaatacttatgtgctgatgtaattgcaccagaaggttatggtgaaatttttggtggctcagaacgtgaaggaaattacgaaatccttaagcaacaaattcttgacgctggtttgaatttagaagactaccaatggtaccttgacttacgtaaatttggtggagttcctcactcaggtttcggtatgggctttgaacgtactattgcttgggtttgtcaccttgaccacattcgtgaagcaattccattcccaagattgattaacagaatgcaaccttaatttggttaataattaaatattgatacacaaagttggactagttattagttcaacttttgtttttgaaaggaaattattttggaatttaatgattatcgggcattaggctttacaaccttacaaaatggattgatcgcttactaccctcaattaggcattagtgatgctgaactaattttgataatccaattggaagcatttagccaacgaggtgagagttttccatctaatgaaaagattgctgctaatactaatttatcggttagtgatgtgggtaatcttattcagcggctaattgaacgaaattatttaactattgaacaaatgactgatagtcaggataaaattggtaataaatatagtctcaataagttgtataatgcacttgatcactatattgatcaaaacgtcttgatcaaagataagaaaaaagataaaactgtttcagttgctaataatttagaaaataatccgttaaattatttgtcacgaaaagtagaagttgaatttggtcgctatctgagtccaattgaacgagaagagattgcgcaatggttaagtgtggatcactatgctcctgaattaattgaacttgctttgcgagaggctgtattgtctcaggcatattctttaaagtatattgatcgtgttttacttaattggcaaaggcatagtctgaaaacaactgatgaagttgagagatttttgaaaaggaatcgataaaaatgacagaagatttattgagtgatgaagaagcacgtagagttttgaaaaaaattttagcattgtatcctgacgcacaaggtgaattgcaatgggatactaactttcatttactttgtgcggttatgttgagcgcacaaacgactgataagatggttaatcgtgttatgcctagttttagtaaaatgttcccaaccccagaagtattagcaaaagctccaattgaagagattgagcatgagataaaaactattggtctatttcgttcaaaagctaaacatttaaaggccactgcgcaaattttggtcgataaatataatggacaggttcctaaggataaaaagttattgatgaccttaccaggggtgggagagaaaactgctaacgttgttttggctgaaggctatggtgtgccagctattgctgttgatactcatgtgtcacggatttctaaaaagttccatattgtagatgacaaagctactccacatgaagtagagaagcgattagaagcaattttacctaaaagtgaatggataaaaacgcaccatgcgatgattctatttggtcgttatacaatgccagctcgagctaaaggcgatccgtattcttatttaaattccgaaaagtaaagccgaaataaattcggctttttttattgaataattttatataatctgttgttactaaattttgattttataatttcaggcctcaactacgtttcggccaaaataaaaacagataacaaaacgctatctgttaataaatatatttaattattgcctagtcattatccgaatcatcattacgttcatgtgattcttcctcaggttttctcgttgatgaactttgttgtgttgaagaagattgtgttcttctttgagaggaagaggctcgctgactgctattggattgagatgatgagccattttcacgacttgatgatgattgagtaactgcagttctagaagatgaaggagtagttccagtattatcgcttgaagtatcagtttcttcatcgtcttcatcataacttgctgcactattaccaattccggctggggtatggcctcgaacaaataattgccaagtgccgccaccagttgctaattctggaggattagagttatttacaattttcgctcttacaactgagctaggctgtttccagtctaggttaggcttattgttcattaggtaggtcatcatactcttatacattagctgtgcagattgttgacctattccagaaatagtaccgtcctttaaattatcgtaaccagtccaaacacccataacatatgatctggtataaccaacgaaccatgaatcttttggagttgaattatagcttgggtacttagctagatcttcatcagagtatttaacagtaccggttttaccagcttgataaagatctgcaatttttgcattagtaccagagcctcgtttgattacgcctttaagcatatcggtaatcatgtaggcagttgatttcttcattacacgtacaccatttgaatcataatttctggttaatccatctggtgtttcaatcttagaaacaaattgcggcttgtggtatacgcccatggtggcaaaagcactataagcaccagtcatttgtaaactagacgcattagcgccaattgctactgataaaccagattttggtgaaacattaacgcccattcggcgagcaaaagctgaagcccgttttactccaacttcagcaagagttttaatagctggaacattacgtgactgctccaatgcatgtcgcatagtcatcatcccgtcgtatttgttgtcccagtcatataattggatattggtaccaggataaacatacttactgtcatcaatcatttttgctgttgaccaattcaagtattgaatagcaggtgcatagtcaagtactggcttaattgacgaaccggtagagcgtccagtttgaacagcccggtctaatcctaattgaacagaaggtaagtgacgtccacctaagattgcaacaacatgaccattgtttggatcaactacagttgcaccaatttgcattttattgtttgtaaaaggtacagaaccgttgttagctaactcgtacagcttgttttgagctttttgatcgatattaatagtaatctttaaattatcgtgatatggatcaaagcctttgctcttaacttcagaaattacctctttaatgtatggatcatcaatttttctaatcttagactcgttattatttcgatgtgatttaagtcccttactaattggttcagcaactgcttgattgtactcagctttagtaattttgtcattttgtagcatagtctttaaaacaatatcacgccggtatttggccttttgcggataaagatatggatcatatgcaacaggtgcattcggcatccctgcaatcaatgcagtttgtgccaaatctaacttacttagtggcttaccatagtagtagttagaagcagtacccatgccataatttccatagttcataaagactttattaatataaaattctaagatttggtctttactgaattcatgttggactttcatagctaaccaagcttcttgagcttttctcttcagagtacgttgagaagcagcagtagagaagaccgttagcttaactaactgctgggttatagtagaaccacctgcagcaatactattacttttggcattagttaacatagaaccaataattctaattgggtcaacgcctaacttatctttgtaaaaacgtttgtcttctactgaaactacagcatcttttaattgctgaggaatgtctttatttttaacataaattcttttttcagaaccaagtgatagtaaaaacttaccattattagtatatagacttgaagatttaccactctgcaattggtcctgactaatgttaggagcatctttggcataaaaagcaaaaagcccgattccagagattactattaaaaatatcagcaaaaagatccatttaatgattctaatccataagtggccactacttggccttcgaccatgatagtctcttcgtgattctcgtttcatattattgttattatctgccatgattatcttttcctatctgcaatgaatttatctaccgccttaagataaggcagtgtaggacgaaagccacttttgatttcaaaagaattgttttcaatttcttttaaagtcattgagcttttatctttttttcgccaagctcgaattacaaaactagctggagtaacaaagtagcgctctaagctagcgaacctaataattgtaaaacaaattccttgttgttttaagcattcgtccaagtgaaaaatttggtgttcatgaaagttttttaatgggaagttagttttattccgtgtttcttttgcctcaaaatcgagatagtatcctttataaacaccattatagtcagttgttgaagcttgcctaaagtaagcttcacgaatgaccgccttagaacgtttgggataatcaactttaacaatttgaattggggttggctttttatgaacaactgcaatttcttccattaaataatatttattagattcattgatttgttgctcaagtgtcatcccacgatcagaaaagttaacaccttttttatgatgatatgatcggtgaactggatgttcatcttttttagttacaggttttctaaatgcggctaaactaccgctaggatatttgaccattgtcctcactcctgttagcattatagcaataaagactacatttttgaacataaaggggggcttaaacaaatgcagcgtttatgggtgactggctatcgcagctatgaattaaatgtttttggcgatcgtgatcccaagataactgtcattaaatatgccctaaaaaattatctgacaagtctactggatgatgggcaattggactggattattactggagctaacctcggtgtcgaacagtggacagctgaggttggacttgaattaggagaaaaatatccggtaagaacatcaataatgattccatatgaagaatttgctaatcgatggaatgatagtaacaaagctaaattcttaaatttgaaggaaaaagtggacttttttgcttcaacttctaataccccttatcaaagtccacttcaattacgtaattatcaaaattttatgattcagcatactgatcgagcattgatgatctatgattcagagcacccaggtaaacctaaatatgattataatttaatccaaaaataccaggaaactaaagaatatccattagatttaattgatttttatgatttacaagatgcagctgaagaataccaagaaaatcatcaaataaatcatttttctgaataatatggtaaaaattttattaaagtctgtttctttattttcagtcagcgttgtttttgctaaaatagggtggaatgtaaaggagttgtcagtaagatggcaaatttaaatgatataaaattatcaggacaagatatattaaagaaacaattcaaaagtaaagtaaagggatatgatcccgatgaagttgatgcatacttagatgaagtaatttctgattatactacttttcaacaaattatcgaagatttgtatggtcagatcggtacgctccaacgtcaattaatggatgaaaagcaaaaagcaaagaaaacagttgaggctgaagaagaaaaggttaagacttatatgccaacgcatagaagaagtgcgcctgtgaagtttgcagaagatgcagatgatactcaaggtgaaatttcgactaatatggctattattcaacggatttcaactttggaaagaaaagtttataatctagaacaacacgtttatggattaaagcattcatttttgctataatgactaacagtgtgaattttgagtaggcgcggctagcttatgttagctgaggaaagtccacgcacacacagactgcgatgtttgtagtgatcgtattcagcctaacaagctggaggaggacgttagtcttcacggcggaaaaagtgctaaatcttcggacatgcattactatcctgaaaagtgccacagtgacgaagcaaggtcagaaatgactttggtggaacgaggtaaaccctgcgagtgtgaaacccaaatttggtgggggagtttcggcctaaggaaatgaactaaaggtcggattattgctttaagcagtaaagatagatgactactgaaggtaatctttgccagagattattggaacaaaacgtggcttatagaaattcacacaggcagagttgggcttttaggtccagctcttttttattttgaaaatgaaagagtaacaatgaaagaataccaactttacgcaactatgggcgctggttttgaaagtgtcgttaataaagaattacagtctatggggtataagacccgtgttgaaaatggtcgtgtctttttttagggtggtcaagaagatatagttagaactaatctttggctgagaacagctgaccgaattaaaattttgctaaaagagtttagagcaacagattttgataccttatttaatgagatttatgattttgattgggccgaattattgcctgttgacgctaagtttcctgttcaaggtagagctgtaaaatccaaattgcactctgaaccagatgtacagtcaattgtaaaaaaggcaattgttaataagatggttgaccagtaccatcgtcgtggctttttgccagaaactggtaatgaatatcccttagatattcatatttataaaaatgtagctcgaatttcgctagatactacaggcgctagtttgtttaaacgtggctatcgagtagagcatggtggagcccctatgaaagaaaactttgcggccgggctattaaaactaactccatataatggtactcaccccttaattgatcctatgactggttcaggaactttagctattgaggcagcattaattgctaaaaatatagcaccaggaacctggcgtaaatttgcctttgatggttttgactggtttaaccctaaactacataatgaagtattggcaaaggctaagagtgaagttaagccgcttgaagcaccgatttgggctagtgatattgatcagtctgttcttgaagtagctaaattaaatgctcacaatgcaggtctattgcaagatattcgctttaaacaaatcgcagttaaagactttactactgatctagaaaatggaattataattgcgaacccaccttatggtaagcgattgaaggatcgtgagtcggcagaagagctgtatcgccaaatgggagaagtacttagaccgcttagttcgttcagtcagtattacttaactgcagatcctaactttgaaaaatgttttggtgcaaaggctactaagaagcgcaaactatttaacggaaatttgcgggttgatttctatcagtattgggctaacagaaggtaagaaatgattacaaaagagcttaacacagaattttgggtgatctcagatacgcacctaatcgcagatagtttacatgatgaaggacaagccttttcacgcatgcaaaaaactagtcaaggtaaggatttgtattatcaagaaatagccctttctgcttttatgcgaatggcacaaagaaaaaagcctgccgcaattattgtaactggtgatgtgacatttaacggtgaacgagtttctgctgagaaatttgctcaaatttttaagccgttgaaagaaactaaagtgttagttttacctggaaatcacgacatttttgatgggtgggctagagaatttcgtggtaaaaaacagttctatgctggtgaaattagcccaatgttttggcgctcgatctttgataaatcatatcgtgaggccttagatgaagacgataattcattggcttacagtgtccaactgaatccgcaatatcttttagttttagcggattcaaatatttatggaaaagaagagacaacagaagcaccgcacactcacggcgaaattggaaaagtacaattaaaatggattgaaaaacaatttcgttatgcgcaggaacatcagttacgtccggttttatttatgcatcataatttatatgcacataatccagcagttaacaagggctatgtagttgatgacgctgttgagctacgacgtttgtgtgcgcgttacaacgtgaaattagctttttctggtcatattcatgctcaaaatattatgggaccacaagacatgacgcctacaactgagatcgttacatcaagtttttgttctaatgatcaaggctatggagtagtgcgagttcattcacggcacattacatatgtgcggcgtaattttgatatgacaagatatttaacggatgaggaaaaggaaaattatactttagttcattatcataagtatttaaaagatctacagcttggtagtatttctgcggatatgatgcaaagtgaattaaatcagtatcacgaagacatcgagttagttagggcgatggggaatttgtttggctggatgaactatcatttctttaatggtcataatcatataaaggctagcgagttgaataaaatccatgcttctaaagaatatcaagttttgattaagcaccatcctgagtatcggttatatctaaagacgctgtacgacacaagtgatcactctaatttacaagtgaagatacgatactaaacaaattttagtataatggatactgattctaaagaaagcggacatgattatgttaaaagatgaaacaaaatttgatcaattagggcaaaagctttttatgaaaggtgttttgcaagacttcgaaaagaaaaatggtccaattaagggcagaatgatggttacagaaggaaagattccgccggaaatgttaactaagctgcaatctgaattgatgaatagtagtaattggattgtagttgaaggtagttttgatttttataattatactgtcggcatgattgtagatttgactacaggtaagccattagcaaatggatggttggtaccacaattgggtcacccagggatgcaacctgcagagaaatggcaagaatttttgattgaaaaagtcgttgatgcaatcgatgaaaaaggtaagattaatttgccgctatatgtttggatttcagatcgtagtgatttgaccaagacggatcaagatttataaaaatatttttaattatgtaaagcttaaacaaaaaggtaggtcaattttgacctaccttttttaggatttatttattagtattaagaagttattgaattaagtaagtagatattatttaaccagtttaattttcaaagtgagctagttattaattgcctgagcagatttttgagcatcccaccaatcgggtaaatcacacaataacttatttaatgtattattgcggtgcgaaattgagtttctctcattgagattcatttctgcaaaggtttttcctagttctggaactacgaataaagcatcgtaaccatagttactgctaccatgtggatacttagcaattaatccactgattctaccagcactaacaatatcattgctttcttgacctggccaagtaaagacaaaggtagtgtagtagctagctgtccttttttcactagaaactccacctaaatagcctaataatttagctttatcatcttgaccattatggtggtaaggcaagattcctaaagagttaagtagataatcaacacttagacctgagctttctgataatgtaggcaaattggtaaattcagctaaacgatgtgctgtagctctagcattacttaaaaatgttgcctcagaatatgacttttgtggtgcataatctacttcagctaaaccaactactttgataggaagactaagctggttaagtttatcttgtaattcattaattttattttggtcatatgttgtaaataataaactatccattattttccccatgctttcaaaaatagatataccatttatattgtatccgctttcatatactgcacagtcattgtcttatctttgtgaagtaaagtcaagcatagataatagcttttatcaaaaagtccatatacttcaggtttttaaactgaataatgttatttttaatgactaagattgtgaaaattatagaaactgtcaaatcttttgtgtaaatagatctttctcgtaaattgattttttaattatttatttaatcaaagtaggattctaaggtgtcctgaacctgacccaagcctttatgaattcgattgaaataacggtcattgtagctcattgcctgaatgccaataaaagcatcaagcgactgttcagttggaaactctgccttaggcttagctttgcgcttgatcacattgttaaatgattcaatcatgttagtcgaataaattgaagctctgatctgcttgggatagttataaaagaccagcagatctggttctatgtctttcaagcttctgataacatggctgtaaaccttgccccatttggtatagaagtcatgcaggacagctgtggcttcttctttgtttgtctgttgatgcacctgtttgaattcgttcatgatcttttcacgatcgtcgacgcgtactttagcgcagatattgcgcatgacatgaaccaaacagcgttgaaaatgagctttaggataagtcctggccaaggctgttttcatgccaacaacaccatcagaaagaaaaagctcaacttgctttaagcctcgggatttcatgttttgaagcatctctgtccagacttcaatgttctcgctaggcgcaatgcagtagtcaatgacctccttgtgcccattaggcttgatgccaatggcaatatagactgcttcacgctcaaatgtttctcggcgcaaaggaaggtatgtcgcatccaaatagacgcagaaaaacttgtcgcttagcttgcgtttgtggtaagcctcaacctttggaatcatctgcttggaaatatttgatacctgagctggactgtaatggctgccatacatcttttcaattagatcggctatgtccctggtggtcacgcccttggagtaaagcttgataatcatgctttccaagatatccgagtgctgcttgtagtcaggcagcgtgtgctgatgaaattgaccgttgcgatcccgaggcacttgcacttcaattgggccaaattgcgtatcaactttgcggaaataagcaccatttctagagttgccagtattccagccatttctggcatagggatcatagcccagaaaggcggtcaattcagcttctaacaagttattaacagcctgttgtagctctttgcgcaataaatcatttattttgtctggattgaatagagcttgagcaaaatctttggtaaaatcattcatgaaggagttcttctttctgtatgtgtttttttgttcaaaccaatcatacgagaaaggaactcctttttctaatgtttaaagaaataaatttaaggaatcattcatccttacacaaactattttacagtctcaaattataatatgaattcatttcaatttatattacttttacgcgtggtgctagttaaatctttctagacaataagccaaattataagctaaaattgcaatttccaaccggctttgaaagcctatcagactacgtgctcgattgttctcggcattgtaataggtcagaagcgaaaagtcgctttcaattgttctgcgaatagccatcaattgatgatcattgtgctttttagctcctgtcatatttttacgatatggtgtccaaagttcataacccatttgttttagctgttgatgcagttctttgcctaaatagccttcgtcgccaagaagatagtaattagatggatgtgcattttccatcagttcaactgtctccttggcatcatgaactgatgcttttgttacgacataatcaagaatgtaaccgtcatcgctaacaatggcatgaactttgaaaccatagaagtaaattttcttggtggccttataaccaatgttggcataaccgcgaaaaattttagcacgatagttgcgaattggttggcaaacaggtaccggaaagctgtcaatgatcaagaaatgtccattcaggtcaacctttttattcatttcttgccgtatctgataaatcaattgcaatagctgacgtgaacgccgattaaaacgtgagtgtgataaacaattgaaacattcacagaatcttctttgtgattcaattcctgtcttagcttgccagataagtaaagccaaaatcagactgtccgtagttttaatttgatcaatatttcgccgatgagtaaactcagccggtgcatacaaacgataccagtgccgacaaattatcactaaatctttaaaactaacttgtaaatggtggctaaaacgcttaagcttaaggcagttcaatcagatcagactcttttctattattactatttacaagtcgagtctaacaagattggacttttttattaactaaaacgatttaactagcaccacgcgtattacttttatatttataacaatcttgtataaccttttgatatataatttctctgaggttgtttttttatatgaaaaaacgaaatacatttatcacactaaacttgtatcaaattacacaagatagagtgattaatcaattaataaaaaaataaaattgtattttaataaaaaagagaaaatcttttttagattttctcaattatgattaactagctattaaaaatttccataatgcattattggtgtaccagttttgcggttgaattgctcctagacaggctacaataatataaattgctaatgttgagattatgaatgcaatgcctaagttgacaatgttgaatggaaaggtagttttatgttgtttcattgcgatgtgaatggcgaaagccaacagaaccaaacctataataattccaaattgataataaatgctcattttctctcctaagttacagttaaaagtatacgttaaaatcggattaaagagtgatttttatttatctagcctctttattttatcaaaatcaatgttatattagagaggtagaaagaagattatgtacatatgtctgtagatatttacaatgaaaaacttgaaccatacgacgatggtaagcgtcataaatttagtggtacttttgatagattaaacgatcgcttagctatttttaaggatttgcgtattgcaggtgctggtggcaatccaattgttaagcagttagcactgcattacttgaaaactttcaaagaccttgatttgaagaggggcgatgtagttgaatttgaaggcatggttgaaaaagattctaacaatggcttcacaattgaacgcccaactcaagcagaaaaaatcagatcagcagctgccgatgatgctaaagttgacgtggttggcgatgattggaattggtttgaaaattagttaacggaagtgacttacgagatgtaagccgcttttatttttgaaatttaagtcatagctagaaatgtagtaaaattaagcttgtaaggagaattagatgcactttgatatctttaatcgaaaaactgtctcaactgataaaatgtttttccagacaacattaaatcctaagcaagcaataatcattggcaatggtgctaaatttcgacgttgggttttcttttctactaattttgctacattttatgtaatcattctgtcagctattagtattttattaattaagtctaatgtttctgtactaatttgcttactattagcattagcaaatttagtaattaatcgctcaatacctcgttattggcaaactttctttggcccgaatgctgaatatggaaaaaatcatcgtccagctattttgcctattttatatatcataaccttgttcggttggctttggagcgtatcacatttcgtaggatctttaacttttattactggtacatttgtgctagtaggtcttgcaggtagtttgttatcgctctggatatggatgaatttgaatactgttagttgtgctccaatcagtgaattacaatggcgaaacaatgccaaacgcaggggaatgtctgatgaagacattgataaggttattgctagtttaaaaaagcgtagagcaatatattttagtaaacacgataaataaaattatagacgaaagatagaatttaatgacagattttacagaatttgaaagtacaattttttcatcagacgataattttgccattcgaaaaattaaacataatgtcattttgacgtattgcactcaagatggtgaaaaagaatatgaaagcctaagtaagaatacatatcgtgtattttttgaaaataatcttgaagttagtcgactgtatccacctgatgaattcagtcacaattggctaatccaaattttaatgccgcaactttcaattgattcgctcaaatctatggcgattgccttaactacattagaaagaattgcgcaaagtcaagaaggcatgcaattatctgaatatgttaaaaatagtgagttagtagaaataaagtcctggtttgatctgcgtaataagttgcgaaaaatatccaaagcttatagcctaattaagcaaagtactgatcaaacaacacagtggctaggaagtgatggacatcgttatcgtgaagtgattttagccaatagtttacggcttaattatggtcaagatgaagttgttcgtttaattccaattaaaaataattgggttattcagtttgttaaaactgatttcagtgcaactgatggcgtaattgatcagctttttgcggcattaacattattgactcaatatgtaaaacaaatttaaatcagagatgaaacatattctttatgcccttaatgggacttttttaatgttactcgttccggctttatttgtattagcattacgacaattaagccatgaagctaaccaaaaattggtaaatacatttggttttaatagtcaaattattgttggcggattaggaattattgttcatgaacttagtcatttgattatggctataatttttggtcatcatattaatgcggttagtttattgcgcatccctagtaataccaatgatatgtcacttggctatgttaaacatacttggtctcctacatctacttatcaaaaggtgggtaatgcttttattggcattgcacctgtattaggatgcaccttgctgatttacataatcatgcgtacattgaatacacctatttcattggttcagaatcagcttactactcagttattaagtaatggtaatgcacttaactggaatttcttaactcatagttggatttatatttttgaattatttcagcttaattttgattcaatatggcactcaattgttgctttattgctagtaatcagtctatgttttggtggattcgatttaagcgaggctgatataagtagtggcaaatatgcttttttaggattaattggtataacctttattatgcttctcttagtttcttttctaggctttcacgctgcattattaccgtttttagttaatattactgtctggatttatttggtattcattatatcaatagtgattttagcaataattaatttaattatgtatattttaaatattattttataaaggagaaaataatggcaaaagcgttattagttatcgactatagtaaagactttgtagctgatgatggagctcttacttgtggccagcctgctcaagcaattgatcaacgtattacagaactgtgtaaacagtttctacaaaataaagattgggtgattttcccgatggacgcgcacttaaaaaatgatccatatcaccctgaaactaaattatatccaccgcataatattattggaactgctggccgtgaagtatatggtcaaacgggtaaatggtatttagaaaacaaagataatgatcatgttttattaatggataaaaatcgttattcagcttttcaaaatactaatctagataattatttacgtgaacgccatattcatgacctgacactaactggtgtttgtactgatatttgtgtattgcacacagcgattgcggcatataatttagactatgaaattacaattccacgttctgctgttgctacttttacatcaaatggcgatgaatgggcaatggctcactttaaaaatgcattaggtgcgaatattgctgattaatttaatggcctgcataatttactagtaagtccaattattactatctaataaaaatatacattataattaatgtaaaggaaaaagctatgtaaagtgaagaggtcaaaatgtatacaaatattcgtaaatttaaaaagggcggaaactacccggaacagcaaaatgggctaccacaagcattttttcataatcccaagtataagaagttaagccccgatgcatgatacctatacatgatacttacgatgagaatgattgattcacaaaccaatggatgggtagatgctgacggtaatatgtatattatttattctaatcaagagctaatggatgacatgcattgcaattcttatacggtgaaacgactaaagaaagaattggttaatcatgatttgttactcgaagaagatgctcctgcagaacatgatgataggttatatcctttaagaattaatgaaaacgaaaaatgataaaagacattggtaaatacggccaatgtcttttatttagtattagtaaagaaaataactaatgtatccgcatcaggataaggctctgaatgaacacttaagaaattttgcagtttatgattgtattcaatattattttcactttgactattttgataaatttgctctagccagctcggttagccggataaatagcattgttcatggcggaacctacagcgttactttgaacgtcatttagtaaatatgatgtcccaatttgattaatttgattgagtaaatgatctatgcgttctatttcctgcttcttatcatgtacgtttggcacaagcagtagagagacggctgtaatatccatttcacattgtgcccaaaatttatcataaagcttgctaaagttttgatctgattgagctaaaagccattcctggtagatttttaaaatacgaattgttttttgaatatcatataaataaagcttacgataactaaactgctgaaattttcttgtaattccagaaagtagttctgtatagcaatctaagtcttcagcaattttaattgccgagtcatttttatttcctttctgtattttatttacattagctgatacttatataagtctatatgataatactgtactttctatacttttattataagatcatcgcatgatttgttaataataaaatgctcactaaaaatgttgtgacaatttattattaacaactaaaaaattatgatagtgtaagtagtaataattatgaaagagcgtgatgtaaatgtctagatggcatagattatttcctgaacgagtttttgatcgtggagaaatatattatggcaatgatatggttgaaaatattcaattagctcaagatcaggaacactttaccgctcaagttcaaggcggaatgggtcgttcttatactgtaactggtcgtcttcgtttagatggtcgagcttcagagttagactgtaattgtccatgggctaataaagggcatcgctgtaaacacgaggttgcggctttacttgcagtagaaaacgaacaagaaaatgaacataacgttaaagtcccttttgctgacttaatttctgaacatcttaagcaaatgattgcacataaaagcccagtacttaaccccttaaatttgattggcaatatgaaatttaccaaaaaaagttatgatcaggcactggaacttaatgatcactggtcgattagtagttgtcggcattttgatgataagatgcgtaaatatgaatatttttgggagatagtaacagaggacaatgagttaattacattatctgtgcaatttactcgctggcaaattatatcaattaaatttgatagtgatttttcccgtattgaaaaagatagtgttagaatattagctctgttttactttattaatgagtatcttgatgacgatccatttgatttaactaaccaggccgctgaagatctacttgaattttatagtgacgcttctacccaaaatgatgagccgattattttgcgggcaagtattgataagtataataacatccctagtttgacgtttaaattaggaaagaacaagcatctttataaagttaaagatcttaatcaactagtagatgcatcccgacacagctcttctctaaagctaggtaagtttttcaacgagcctataaatcaggctaaaatggatattgatagtcaacactggttatcttttattgaaaaaattatagatgctcgtaatctaaacgaagaattttattataattacagtagtcaggttggtcgcattacactagagaactctgtggccgatgaagttaatgatttactttatcaaggcgtaaagttgtactcaaatgagcagcctataggatatacaactgatcaactagatttaaacattaaaattgaaactcaaaagtcatctgctttagttagtgtagaggatcttccagtttctactataattactgggagtcatgcgtattatggctattacaaagatgtatggatcaaatatataggtcttacgcctgcttctttgcataatttaggattgcagcctggtgctgaaatgcaatttagtaaaaagaccgttgctaagtttgcacataatattttgcctaaatttgagcaaacaaagtttatattagtgtctggtactgatgaattgaaagctattttgccaccagaggcccattttttgtttaaattagattatcgtgtaggcagtattttatgtgtggctcgagtacagtatggggatgcacaatacgagttaaatcaaggatatactgaagaggaccgacgcgatgttgaaaaagagaccgcagcatggaagcacattaatacatattttagtgattatcagcatgggcggtatgttttatccaatgaagactcggatgtcgtacaagcttttctagatgatggtatcaatgagttgaaacgattaggcgaagtacaaattacagctaactttagatcacttttaaagggaataaagattaatttggatgttggagtaggtatcaacctgactaatgaattattagatatcgatcttgctgatcaaaagatgagctgggaagacattcaagcggctttgaaagcctaccaagaaaagcgaaaatattttgttttaaaaaatggaatgctagctaaggcagaacaaccgacaattgaacaattggcacaaactttgcatgatttaggtattagttttaaggatttcattcacggtaaattacatttaccagcatatcgtgccttttattttgctaagcaaatgaaagctgctaatgcactgcatttctcaactaatgaatcctttaatactctgattaatgatttagctaagaatcagttgaagcaaaatcaaataccagttagtttgcaaaatattttgcgtccatatcagaagataggttttaattggctaagcactatcgttaattataaatttggcgggctacttgctgatgagatgggattaggtaaaaccttgcagattattagtcttcttttagctcgcaaagaaaaaatgcaaaatcagttacctagcttaatcgttgcgcctgcttctgttatctataattggcaggcagaagttaaaaagttcgcacctagccttaatgtggctctattagatggcactaaaaaagaacgagagagattgcttttagatgctaaaaagtataatctgctaatcagttcatatcaatcgcttaatcgagatctagaagcgtaccaaaatctaatttttgatgtagaagtaattgatgaagcacaaaatattaagaatcagcaatcagttaccgccaagacagtcaaagtcattaaagcgcatcataaactggctctaacaggaacaccgattgaaaataaattgagcgagttatggagtatttttgattacttaatgccaggttttttaggtttatatcctgactttaggaaaaagtatgaattaccgattgttaaagagcaagataaagaagcagaagatcaattagctaatatgataataccctttatcttgcggcgtctaaaaaaagatgtgctacgtgacttacctgacaaagatgaagaaattgtgcctgttaaaatgaataagaaacaagctgatttgtataatatgcagacgcaaaagattatcgctcaattaaatggacagggggatgaagactttaagagatcacgttttcaaattttggctcagattactaaattacgtgaaatttgttgtgatcctcatttgctttatgaaaactatcacggcaagtctaataaattaattgctacaattgagttgattaagaataatctagcaaatggacataaaattttattgttttcacagttcacagctatgctagatattttgcatgaaaaccttgccagattaagactacctttatttactattactggatcaacacctaaaactaagcgtcaagaacaagttcaaaagtttaatcaaatggctcaaccaggggtctttttgatttcattaaaagcaggcggaacaggcattaacttgactggtgctgatgttgtaattcattatgatccttggtggaacttggctgcagaaaaacaggcgacggatcgagctcatagaattggtcaaaagcattctgttaagatttataagatggttacagaagacagtattgaagagagaatcattgctttacagcaaaagaaagcagaattagctgatataattttgcaaaatgatcagattgctgatgcaacaatgagtaaagacgatttaattaagattttgaaataaatagatcattataataaaataaaaatatttgtttgtatttgcgaactattgtttgcaaaagtataatatttaggtaaacaaaaaccaacaagctaaatgcttgctggttttataattttagtttgagttagtatgtttctttttataccaatacactagaccgaatggaaccagattctcttggtgatgttcgattcgaataatattgcttcggtgactccagtaaattaagattacgagcaatccactgataatgctcaaggcaagatcgtggaaaaagaatgaagcaataaagattagaactactgagatcaaactagttaatgaaaccatacttgtaataaataagatagggaagaagattaacgcacagatcaagaaaaaatggacattatatcctagtaaaaatccagcggaagttgctactgccttgcctcctttgaactttaaaaagacaggaaaagcgtggcctaaaattgcagctaagccaaaaatcaagcaaagataatgtggtcctagtttaaaaattattggtaatactgtagcaaaagttcctttgagaaaatctactataaagacaatgattccagcagctggtcctaatactctaaaggtattagtcgttccgatatttccagatccgtatttcctaatatctttatgaaaaaagatattacccactaacacacctgttgggaatgatccaatcaagtatgctaaaataaacaacgatgcaaattttaatgcaaacatatttaacaacactcctattaatctatcgctattttagcaaagattatcttttaaatatatggtgctggttaaattaatgaacaagtggaggaattttagtggcaaaagctaatacttatgatgattcttcaattcaaattttacatggcctagaagccgttcgtaaaagacctggtatgtatattggttcaactgatattcatggtcttaatcaattagtgtatgaaatcgtcgataactctgtcgacgaagccatggctggttttggtaaagaaattgatgtaatcattcattcagataatagtgttactgtaagagactttgggcgtggtatgccgacaggaatgcacaaatcgggtaagcccacaattgaagttattttaactgtattacatgctggtggtaagtttactgaacaaaattataaaacttcaggcgggttgcatggcgtaggttcatccgttgttaatgcactttcaagttatatgaaggttagagtcgttcgcgatggtaaagcttatgaagaagaatttaaagatggtgggcatccggtaggtacattaaagtgtgtaggaaagacaaaagagccaacagggactaccattacgtttaagccagatgagactatcttttcaaccacgaagtataagtatgagacaattcaggagagaattcgtgaatatgcttttctacttaaaggggttaaatttttcttaacagatgagcgtgagccagaacatcatgatgtttttcagtatgatgatggaattaaatcatttgttaagtatttaaacgaaggtaaaggcacaattagtgatgtcttttattttgaaggcaagcaagatggcatggaaattgaattttcaggtcaatatagtgatggatattcagaaaatttagtttcatttgttaacaatgttagaactggtgatggtggtacccatgagtcaggtgctcgtagtggatttacacgtgcatttaacgattatgctaaaaagcagggtctactaggtaaaaaagataaaaatattgatggttctgattatcgtgaagggcttagcgcggttttatctgttaaaatccctgaagaattacttgaatttgaaggacagactaagggtaaattaggtactccacaagcacgttctgctgtagattcacttgtttatgagaaaatgtcttactatttaatggaaaatggtgagctggctcaggaactagttaagaaggctcaaagggctagggatgcacgtgaagctgctaaaaaggcacgtgatgaaagcaggaatggtaaaaagagacgaaaaaaagaagttttgtctggtaaattaacgccagctcaatcgcgaaatcctaaaaagaatgaactattcttggtcgaaggtgattcagctggtggatctgctaagcaaggtagagacagaagatttcaagcaattttgcctcttcgtggtaaagtattaaatactcaaaaggcaaaattgcaggatatctttaaaaacgaagaaattaataccatgatttataccattggtgctggtgtaggaaccgagtttaatgttgatgactctaattatgataaagtcattatcatgactgacgccgacgatgatggtgctcacattcagatcttgctattaacattcttttatcgttatatgcggccgatgattgaacacggaaaagtttatattgctctgccaccgctttatcgcttacaaaaaggtcgaggcaaaaagacgcaagttcaatatgcatggactgatgaagaactagctgatgatgaaaagaaaatgggacgtggctattcgctgcagcgattcaaaggtttaggtgaaatgaacgcggaacagctatgggctactactatggatcctcaatcgagaatgttaatcagagttaaaattgacgatgctgctcttgctgagagacgagttactaccttaatgggtgataaagtagccgcaagaagaaagtggattgaagaaaatgttaaattcagaatgggcgaagacggctcaattctagaatccgaagatgaataaaagaaggttttaaatttaatggccacaaaagaacgaattcgagaaatgccacttgaacaagtaatgggtgaacgttttggacgatattcaaaatatattattcaagaacgtgctttgcctgatattcgagatggcttaaagccagttcagcggcgtatcctttatgcaatgtatcaagatagtaatacttatgataaaccatttaaaaaggctgctaaggctgtcggtaatatcatgggtaactttcaccctcacggtgacagctcaatctatggggctttagtgcacttatcacaagactggaagatgcgcgaaccgttagttgaaatgcatggtaacaatggttcaatggatggtgatggcccagcagctatgcgttatacggaatcccgcttaagcaaaatctctaatatgcttttgcaagatattgataagcaaaccgtaaacatggtgcttaactttgacgatactgagtatgaacctacagtcttacctgcacgctttcctaacttattagttaatggatcaactgggatctcatctggttacgctacagagattccaccacataacttaggtgaagtgattgatgcaacaatttatttattgaaacatcctgatgcttctcttgaagatttgatgaaatatgtaaaaggccctgactttccaactggtgctattgttatggggactaagggaattaaggaagcatataagacaggacgtggtagaattcaagtccgtgccaaaaccactattcaagaaattcgtgggcataggcaagaaattgttgctacggaaattccattcgatgttaacaaagcactattagtaaaaaagatagatgaaatccgtctgaataaagaaattgatggaatcgcagaagttcgtgatgaaactgaccgccatggtttgtcaattgtgattgaattgaaaaaagatgctgatgcgcagaatattttaaattatttatttaaaaatactgacttacaagtatcttataacttcaacatggtcgctattgatcacatgactcctgttcaagttgggctaaaacgaattttagcttcttatttagaacatgaagaagacgttgtaactaaacgtacgaaatttgacttagataaggcagaagctagattagagattattcagggcttgattcatgccatggatattttggatcaagtaattaaaaccatccgcgcttctaaaaataaagccgatgctaagaagaatttaatagctaagtataataaatttactgaaaaacaagctgaagcaattgtttctttacaactttatcgtttaactaatacggatgttaatgaattaattgctgaacaagacaagttaaataaattggccgaaaaataccgtaaattattatcagatcgtgcaactttagaaaaagaaattattaaagagttaaatgcagtcaagaaagaatttgctaatccacgtcgaactcaaatttcagaagaaagtgctaaagttgaaattgatgaaaaagccttagttgctgatgaacaggttagagtactaattagtcgagatggctatttaaagcgttcatctttacgttcatatcagtcaactaatgatgatgacaatggtttaccagatggtgacaaagtagtttatgaaaacacactatctaccctgactaacttgtatttatttaccaataaggggaatgtcatttatcgtccagtacatgaactaattgaaaccaaatggaaagaaacaggacaacacctatcacaagaaattggattagacagtgatgagcaaattattcgcgtctttgtatttgataaattgaatactgattgcaactttattctggctactaatgacggttatatcaaacaattggagttagctaacttacagccgacgagaacttataagtcacgtgcaatgacagctatcaagttaaagggcaaggatagttatgtagttggggtagatttgatcaaatcagataatcataaggaaatcacattatttactcatcgcgcctatgcaattagatatgatgttagcgagataccaacttcaggagctaaagcagtaggtgttaaatctgctaacttgaaagatgacgattatatcgtaaattatgtcctagttgattctaagtatgttgatttaatgcatgttgggctaattactcaacgtggggcatttaagcaattcaaacttaaactagttaataaagtttctagagccaagcgaggggtactagtactgcgggaattgaagaataaaccgcatagaattgttgctctaatgccatatgctcaagatcatttgttacatgtcactacttctagtgaccgtcatgtaaatattaaaactacggattatccattaggcgatcgttattctaacggctcatttgttattgatactactgttgatgggacgcctgtaagtattgaattgggaagacccattagtagtcaaaattaagatttgagtttaactaaaacaatatattaatctttaaaaacagtgttaagacatatgttttgacactgttttgttttggatagataatagcagtgttatgggacatggcttatcgtaaaataatattttaggaaaaagataatcgttatgtctaaaagtgatactattttatcggctaaatcattgcgttattttttacaattgattgagacgatgaattatacccaagctgcacaaattttaggtattacccaaccggctttaactcagcaagtaaaaaaattggaacgcgctattggtgctccattatttggacaaatggggaagaagttatacctaaccgaagctggtaaagaaatggaagcagcagcgatagagttgctaaataccattaatggtgttattagtgacattcaagaatatacccagtcagataaaggcaatatttcaattggtattctagagtccgtacatgttgatcttttctaccaatttttacgttacttcaataaaaagtatccagaagtaacttttactgttgattactttgaccgcaaagagctatggcacagacttgattccaatatgattgatatggcgattatgtatatgccagatactactaataaaacaggagctaatttccgtcatcaatacaatcatcgtgatatttgccctgagcatattgttgtactgactcacaaggataatgtggaagcaggagggacatattctgttactcgttttggcaacagaaagtgggttgcatatccggagaattactacttatcaagattaatgcgacttaactttagtaaaaagattgatctcgttactccgtttaaaattgcatctactaaggaaatgatcaaaattgcagaaaatactgatcttgatacttatgtagatcagacttactatgaggcgcataaggatgagattaatttgactcctgtttatattaaaaatatgcctgagtttacgactgcttgtgtttatcgtagaggaaaattagatgttcctaggatgaagaaattactaacggaattacagattttcttagacaataacttggataggaaccataattttagtaaactattaagtgaagaaattaaataaaataattagaaaaagaggcaatttatttaatggaaaaagaatttgtttttggacaccaaaatccagatactgatgcaattggcactgctattgcattttcatatttgcaaaacaagttaggttacaacactgaagccgttgccttgggtgagcctaatgatgaaactgcatatgctcttaaaaaattcggctttaaagcacctcgtgtaattaaagaagctgctccagaagttaaatctgttatgttggttgaccacaatgaaccacaacaaagtgtttcagatattgacaaagttaaggttactcatgttgtggatcaccatagaataatgaattttaataccgctgatccattatattaccgtgcagaacctgtaggctgtacttcaaccattgtttggagaatgttcaatgaatttggcattgaaattccagaaaactacgctggtttaatgctttcagctattatttcagatactttacttcttaaatcaccaactactacagataaggataaaaaggctgtagaagcattggctaagattgctggcgtagattacaaggaatacggcttagcaatgcttaaggctggtactaacatcagtgacaagtcagaagaagaattgattgatttagatgccaagagctttgaattaaatggtcacaacgtccgtgttgcacaaatcaatgttgttgacttacctgaagcgttagaacgtaaggaagcctttttaaaggcaatggatgcttcatctaaggataatggctatgatatgtttatgcttttaattactaacattcttgactcagattcagaagctttagttgttggctctgatgagactaagtcattattcgaaaaagcatttaataagcaacttagtgattcagaagttgaattacctggtgtagtatcacgtaagaagcaggttgttccacctcttactgatgcttttaatgcttaaaagtaatgatgtaaaaaataggaggtagggttaaccgcctcttattttttacctaaaaattaaaactgattttaggagaaaaatattgaaatacccacaattaaatttagaaaatcaacagggaccaacagctgtattgaaaaccaatcaaggtgaaataaaaattcaactttttccagaacaagccccaatgacggttgaaaattttattcgtttagctcaaaaaggctattatgatggtactatttttcaccgcgtaattagcgattttatgattcaaggtggagatcctgaaggaaatgtcactggtggtgaaagcatttgggggcatccatttgaagatgaactttcacgagaactttttaatattcgcggagcattatcgatggctaattcaggccctaacactaatggtagtcaattttttatcgttcaaaacaagaatatgcctaagcgttacataaaacagatggaacccgcaggctatccaaaggaaattattcatgcttataagcaaggcggaactccatggcttgacggtcgtcatacggtctttggacaagtaattacaggcatggatgtagttgataaaattgctaagtcgaaaaaagataaaatggataaaccactagaagatataactattgattcgatccaagtccaaggatcaaagtttgatgactaacaaaaacgtgctgttttttcggaataaacagcacgtttttgttaattattcatttcttttagaagggtgatcaaagacttacatacgcgttcagccttaggttctggtaattttcttaattcgttaataacttttttcatgaaaacgggtgtattgttatcatgaattttttcaggcttgatttttttagcacgataggcattgttaatgatatcgggtgtagtagtattcaaagctttggcaatagaatcaagcttctgaatactaatgttttggtccttagtcctttccacacgtgaaataaaatttacagaaagatcacttagctcagccaaatcttcctgtgttagtttctgttcacgtcttctacgagaaatttcttctcctaaattaatattcacaagcattcgatcctttcaagtaacttatagcctatataaaattatgtaaaaaatgaatagactattttaatattctcaacatacacttatattaaataataagaaattatatttgtttataaatgtacatttttagcgtaatcagtgctattaggcactacagtttagaaactgtcaaatcttttgtgtaaatagatctttctcgtaaattgattttttaattatttatttaatcaaagtaggattctaaggtgtcctgaacctgaccaaagcctttatgaattcgattgaaataacggtcattgtagctcattgcctgaatgccaataaaagcatcaagcgactgttcagttggaaactctgccttaggcttagctttgcgcttgatcacattgttaaatgattcaatcatgttagtcgaataaattgaagctctgatctgcttgggatagttataaaagaccagcagatctggttctatgtctttcaagcttctgataacatggctgtaaaccttgccccatttggtatagaagtcatgcaggacagctgtggcttcttctttgtttgtctgttgatgcacctgtttgaattcgttcatgatcttttcacgatcgtcgacgcgtactttagcgcagatattgcgcatgacatgaaccaaacagcgttgaaaatgagctttaggataagtcctggccaaggctgttttcatgccaacaacaccatcagaaagaaaaagctcaacttgctttaagcctcgggatttcatgttttgaagcatatctgtccagacttcaatgttctcgctaggtgcaatgcagtagtcaatgacctccttgtgcccattaggcttgatgccaatggcaatatagactgcttcacgctcaaatgtttctcggcgcaaaggaaggtatgtcgcatccaaatagacgcagaaaaacttgtcgcttagcttgcgtttgtggtaagcctcaacctttggaatcatctgcttggaaatatttgatacctgagctggactgtaatggctgccatacatcttttcaattagatcggctatttccctggtggtcacgcccttggagtaaagcttgataatcatgctttccaagatatccgagtgctgcttgtagccaggcagcgtgtgctgatgaaattgaccgttgcgatcccgaggcacttgcacttcaattgggccaaattgcgtatcaactttgcggaaataagcaccatttctagagttgccagtattccagccatttctggcatagggatcatagcccagaaaggcagtcaattcagcttctaacaagttattaacagcctgttgtagctctttgcgcaataaatcatttattttgtctggattgaatagagcttgagcaaaatctttggtaaaatcattcatgaaggagttcttctttctgtatgtgtttttttgttcaaaccaatcatacgagaaaggaactcctttttctaatgtttaaagaaataaatttaaggaatcattcatccttacacaaactattttacagtctcacagtttatagtatagtcttaaattgaatacttttattgttaaaatagaaatgaaataaaagctaaaaaaaatatactaattattaagtttttaagcttataatgtatacaaggatataaaaatagattggggatttgatgagtttaaaagaggttttaaatagtaatcggcctgcagagtcacgacaattagcgtgtgcgttaactttttgtgggggatttattgatgcatatacatatatccagagaggacatacgctttccgctggacaaacaggaaacgttatcttttttagttcagcattagctgatcataatgttcctggaatgattaatcgagctagtacgtttattgctttttctttaggattgctattagtaggactttttcataaatatgtgaaaagtcactattggagagtattttgcttatttccaattttagcgatttgtattgtagtgggctttttgcctaaaagtgttcctaattattatattgtgcctgctattgcgtttggattggctattcaaaacgcatctttcagcaaaattgaaggcatgggttataacaatgcatttacaactggaaatttaaaaaaatcggttgttgcatggagtgcatttttttttggtgaagacaaaagtaaacatacagctgccgttaattatatgatgttaacaattgcatttgcagttggagcaataatttcagctttactgcaaaaattattggtattaaaaactatttggattgcagtcatttttttaacgacgattaatttagtttatatcattgcattgagacgaaataaaaaaattgatttttcaaaatgattttaaaagcacttgtcataattggcaagtgtttttttgaagaggttgtgagtgagaagaaagcgaccaatctgaaaaataataattttataagtgtgcgtataattaatattatgtaaagtcagattgaaaaacaatcaatttaataatagaagtcataattaatttaattgtttcagcaaataagtcttattttggatttgttaactcgaattcagagactgtaaaatagtttgtgtaaggatgaatgattccttaaatttatttctttaaacattagaaaaaggagttcctttctcgtatgattggtttgaacaaaaaaacacatacagaaagaagaactccttcatgaatgattttaccaaagattttgctcaagctctattcaatccagacaaaataaatgatttattgcgcaaagagctacaacaggctgttaataacttgttagaagctgaattgactgcctttctgggctatgatccctatgccagaaatggctggaatactggcaactctagaaatggtgcttatttccgcaaagttgatacgcaatttggcccaattgaagtgcaagtgccccgggttggcccaattgaagtgcaagtgccccgggatcgcaacggtcaatttcatcagcacacgctgcctgactacaagcagcactcggatatcttggaaagcatgattatcaagctttactccaagggcgtgaccaccagggaaatagccgatctaattgaaaagatgtatggcagccattacagtccagctcaggtatcaaatatttccaagcagatgattccaaaggttgaggcttaccacaaacgcaagctaagcgacaagtttttctgcgtctatttggatgcgacataccttcctttgcgccgagaaacatttgagcgtgaagcagtctatattgccattggcatcaagcctaatgggcacaaggaggtcattgactactgcattgcacctagcgagaacattgaagtctggacagatatgcttcaaaacatgaaatcccgaggcttaaagcaagttgagctttttctttctgatggtgttgttggcatgaaaacagccttggccaggacttatcctaaagctcattttcaacgctgtttggttcatgtcatgcgcaatatctgcgctaaagtacgcgtcgacgatcgtgaaaagatcatgaacgaattcaaacaggtgcatcaacagacaaacaaagaagaagccacagctgtcctgcatgacttctataccaaatggggcaaggtttacagccatgttatcagaagcttgaaagacatagaaccagatctgctggtcttttataactatcccaagcagatcagagcttcaatttattcgactaacatgattgaatcatttaacaatgtgatcaagcgcaaagctaagcctaaggcagagtttccaactgaacagtcgcttgatgcttttattggcattcaggcaatgagctacaatgaccgttatttcaatcgaattcataaaggctttggtcaggttcaggacaccttagaatcctactttgattaaataaataattaaaaaatcaatttacgagaaagatctatttacacaaaagatttgacagtttccgaattcaggttatttattttttcaaaaatgaattttgcttttttaatttttgtttttacttcatttactctgactatgataagaaaatcaactctcaataaatttttacatgctgagatcgcaattctatgaccaagttcatttattttgatcaatagttttatagtttaatagttagttgttcatttgtatgaaccagtttttaaaagtaatggttttattgatggttggaattatagtttttcatcaagttaatcaagctagataaaattacttttatggctaagagtaaatcaatggtatcctagatattcttgaaataattttttagatgattagttatctgtatattttatggctaaaagtctgaattgaataatatgctgacaataatcaataaaacaaccttcaaagagaagtattttgaaacaattatggtaaagtaattctaattaaaaacaatgaaaatagttgagtaatatttgctagttttgcctttagtatctataaagccattttttatttttatgctatagctttctttaaaacaaaaattttaatgatcgctagataaacctatctcgcaaaagcctaattttggtaaatttgtgcttttgttatttttattgttttaacgttttgtatttcattttaaattcgtaaaaaaatattttataaattctttgctctttttgctacatacaaatcggtattaagtgcttttatatttattcttattccctatttttaagatttgctgcaataatacacatattgaaatttcttaaataaataatcaagcggtaaaaatgataattctactaaactcatgactcaagtcgctacttaaatctgtgtttttacatgaataagacatctaaataaagtttcaatcttcaaaaaatgctgagaatcactctaagatttctttttaatgaattaatttatcgtggttactcaatctttatacaaacaagcaacattttaattcattattatacctctatctcccctcttctgctgaccagggaagacgaaaaaagagccgaaatcagacataattcgtccaatcaggctctttgcttatctagctagaataaaaatctgaataaactcaatctgttgcaggtctaattttattcataatgaaggcaacgacgattaccaagataactgcacctaaaattgacggtacaattgccatgtccgcaaccttcggtccccattcccctaaaagggcttggcctagtgaagatccaaccaatcctgctaaaatattagcaatccagttcattgacttaccatgtccagttaaagcacctgcaattaagccgattactccaccaacaattaatacccaaatccaatgtagcattttgatcacatttgctttcttgcaaaatatcttatcacatttctgattaaacaaagcgctttctttaactatctttattttgagactgtaaaatagtttgtgtaaggatgaatgattccttaaatttatttctttaaacattagaaaaaggagttcctttctcgtatgattggtttgaacaaaaaaacacatacagaaagaagaactccttcatgaatgattttaccaaagattttgctcaagctctattcaatccagacaaaataaatgatttattgcgcaaagagctacaacaggctgttaataacttgttagaagctgaattgactgcctttctgggctatgatccctatgccagaaatggctggaatactggcaactctagaaatggtgcttatttccgcaaagttgatacgcaatttggcccaattgaagtgcaagtgccccgggatcgcaacggtcaatttcatcagcacacgctgcctgactacaagcagcactcggatatcttggaaagcatgattatcaagctttactccaagggcgtgaccaccagggaaatagccgatctaattgaaaagatgtatggcagccattacagtccagctcaggtatcaaatatttccaagcagatgattccaaaggttgaggcttaccacaaaaacgcaagctaagcgacaagtttttctgcgtctatttggatgcgacataccttcctttgcgccgagaaacatttgagcgtgaagcagtctatattgccattggcatcaagcctaatgggcacaaggaggtcattgactactgcattgcacctagcgagaacattgaagtctggacagatatgcttcaaaacatgaaatcccgaggcttaaagcaagttgagctttttctttctgatggtgttgttggcatgaaaacagccttggccaggacttatcctaaagctcattttcaacgctgtttggttcatgtcatgcgcaatatctgcgctaaagtacgcgtcgacgatcgtgaaaagatcatgaacgaattcaaacaggtgcatcaacagacaaacaaagaagaagccacagctgtcctgcatgacttctataccaaatggggcaaggtttacagccatgttatcagaagcttgaaagacatagaaccagatctgctggtcttttataactatcccaagcagatcagagcttcaatttattcgactaacatgattgaatcatttaacaatgtgatcaagcgcaaagctaagcctaaggcagagtttccaactgaacagtcgcttgatgcttttattggcattcaggcaatgagctacaatgaccgttatttcaatcgaattcataaaggctttggtcaggttcaggacaccttagaatcctactttgattaaataaataattaaaaaatcaatttacgagaaagatctatttacacaaaagatttgacagtttctttattttaagcgaatgaactatttcttgtcacttttaaaatatattatttgactgtcttatacttttctttagatttggggcatatttcttgccacgactaattctttattttttgtctattgtatatctcaatttgatttcaatttttttcggtttgattactgatatattaataaatgatctcatctattgccttttgagaactatatctgtagtctataaagtataaattatgtgagagatatagataagattctctccactaagtatggaggacataaattgtttaaaaggaaatcaattattaaattagcatgtgcaactatgttaacgaatgcaggtgtcacacttttatctcaaatgactcgtttctctgactcagagagcattgtgcaagcttcatcaacatcagttgttgctaaagcccttggaattgatgttgccagctaccaaagcgcagatttaactgctcatgccaaggctggttctcaatttgcaatcgttaaagttagtgagggaaccagttatcgcaaccctaaggcagccaatcagattaaatctgctattgctaatgatatgatgccgatggcttatcattttgcaacttttagttcaagttcatcggccgctaagcgcgaagcgcaatacgcaatttcttctgctaaggcgttgggattaccagctggctcatacttagcctgcgattatgaaactggtcagggcaatatcattactaatggtaaaaatgtgacagctaaggctattattgcctttatggatcaaattaaggcggctggctatcaaccacttctctatgctagttcttccgttttgcaaaacaatattaatactccatctatcgtgaacaagtatcctaattcactctgggtagccgcatatgcgatttcaggccgagtagaccaacccaactttaaatacttcccttcaatggatggtgtcgcaatctggcagttcacagataattggcgcggaatgaatactgatggcaatattacagtcttgccattatcaatcgcaggtaacgcggcagtttcacaggctcctaaggcttccaataccaagaaaacagctacagttatgtacaagtcatatgtttatgacaaaaatagcaaccggacaaatgatttttataatgcttacagctctattgcttattatgacaataaggtgagaattaaaggcaaatcaatgattcgtgtcggtgaagacaagtatgtgatggcaagtaacgtactaggcaattcacgcgtctttaaagctgatgctaaagtgtataaaaatgatggcaccattaatacaaaatggtctactaaaaaatccggttcaccgatcaagacttatggccctaaacattacatcaataatgaagcttactatcgaattggtaaaaatgcttacgtcaaagcagacaagttctaatttatttttagcagcaaatatttgctgcttttttgatgcatccctaaaacgtaaatgaactgacaaatcatttccaatttatttatctgcatcccttttttatccatgttaaaattaaggcattatatagaaacgaggataagataaggatgaaatttaaaaagaagttagctttattcttaggtctgggagtattattgctttctctgactggttgtagtgattttcaaaactgggaattatctatgcgctctaagattggggcattgcccttaacagtatcaacgtatgattctaatggacaaaagatcgaccagatcaaagctaagtcagttaatattcatactgataaaaagatgtcacagaaaagtagtaatggcactgaacattctagcgtaattgatgttgactatggcaataatcgaatgattcacgttggttctactatgattgcctatgaaggactgaaaaactacgaggatgcatttaacaaaaaagttaagatcgacgatcaaaatcgttctgttcctctgttaaatacaatgtatcagaattttaaaaacgattggaatggtagctcaagagtagtaatgattagaagccaattaggaatgccgattgctgtctttattggaaatcacgtctcaattcataagagtgatatgaagaatgcaactcaatttgtgattgatggtcatcgtctatttgtttaccgtgctgattacacagtttatccaatgtccagtttaaaaagcaattaactataaaaagtgtcaatcctcattttaaggactgacactttttattatttatcatcaattaatgcattaaatgcttcattagtttcaacgatgtcgctcattacttgattaatccagtcattaagcttatcgttatcgtagttttctaaaccgccttcggaatctccaatgtccgcaataccattattgaaatctactagttcagtaattaacttttgagcaaaaatcttagtggtaccaccaaagtttttcgcaaaattatttacatccccatatgcatcggcaatatcactgaaaactgtgacagttttaccaaaagtctcactcaagttatctacatctgcttgagttggtacagtcaattcttcatcttcattattaagttgttcatctaaacgaacgccaatgtcgtttaacactaagtgaccatcatatagacgattcagtaatttgataccactagggtttttagcttggaagtttacactaatttcttctgtcatactttttcctcatctcacataatgtattttcatctattgtacaatttttagccaaaaaatacgactaaacaaggaaaataagcttttttcgattctttataaaaaatgttatattttacttgaacattagcaataaagagcataaaataaacgattgaaaagtgttgtaccatacaaacaacatatgtttgtaagtaatgtttgaattactaaatgtaatttgcccttacttactgacgagcaatcactgttgctataattagaatgctaagagttttctataagcgttgctggtattctagttatagtgacatgattatctaagttaaatttagttgcaatcatttttctacgttagtactatagatattcacgttcgaatgagcgcagtaattttaaattagactgttttttatcacctattcctgagaataggtgatttttttatgattaacgtatttgtatgatataatataaacattagttcgcaaaaggagtagatatggaaactgctaaatacctagaattgatccaaattgaagtaaataaattgcctgattttgttaagcaatttaatcttggtactaatcattcattaactactacttaccagtacttaactgaaattcgacgcttcttcgattggctacgtcaagaaaatatctcttctgcttcagataatgctcatgttactacggatacattagccaacttacgtcgcaatgacataatgctgtatattgattatttaggacatacccgtaataagcaaggccgactaaactcccccactacgattaatcgctcaattaatgctttacgctccctatttaagtttttaaccattactgccgacaataatcatggtgagccatattttgaacggaatgtaatgcttaaaattaattctttaaatgatacgcaaacacttaattatcgggctcatgtacttgaaagccacatgtacactggtaagttaaaatttgaatttttgacttttattgatcaggactatattaaccattgtaataagcaagcaaagattggttttaagcaaaacaaagaacgtgacatggcaattgctgcattaatcttaggtaccggcattcgggtgtctgaatgtgctggcgttgatttgagtgatttaaaccttaaggatgctgtactagatgtaactagaaaaggcggacaaaaagatagtgtaccaattgcagaatggacacttccttatatcaagcgatataaaggtattcgtaatgaacgctatcatgcagatagtaagcaagtggcattctttttaactcaatggcatggtcaaacgcggcgaattacaactaatgcaattgaaaaaatgatcaataagtattctgcagcttttggtcatccccttaccccacataagttacgtcatacggttgcttctgagctctatgaagtaactaaagatcaagtgcttgtagcacaacagctaggtcaaaaaggcacttcagccaccgatctatatactcatgttgatcagaaaaaacagcgtgcggctctcaatgagatctcaaaaaaaaatcacgattaatcaaattaaatgcaaaaacgagtttggctattcaattccaaactcgttttttattaatgtttcaatttcttgtaagcttttttggagccaagatctagatcacgattaaacttataatcttgccagtctttaacaaagagtaaatctaagttatatccttttgggtacaagtctttagctagtcgtcttaattgtaaacgtctgagtggtacttctacaaattcttttgtcacaaatatctttgctgcattttgggtaggaagatatttataaaagattccttcttcttttaaattggtagcatatacaatatcacctttatgaaattcttttttaacaaccaggttgcttttgtttttccgctggtgaacgaaacgtttttttaaagataaaggtaaattattgcccgctaatatggcttctgcttgatgcaaaacattttctggaatacctgattttttggcgatccatagtgctcgactattaccaatacttcctatctttaacttataagtaggttgcagattttttaagtcaaaatccattgcagctgtgataaaaccatcatgctgcttagcaaaatccttaatagagctgtagtgtgttgtggccatgattaaacagccacgtaaatacaactcttgtagaataccaatagcgagtgcgcttccttcatttggatctgtccctgtccctaattcatctaataatactaaactatggaattgagcatatttggtaatcatggcaatatctttcatttcggctgaaaaagtactcagagaattatctaggtcctggtgatcacctattaaagtaaaaacgtcatccattaatggaatatcacatggtttatcgcttggtaaaaacagacctagttcggtcattaaaatcatcaagccagtagttttaagcgcgacggttttaccaccagcatttggtcctgtaatcattagaacactattttcttgggttaattctaaggttaacggaacaggattaatgatcaagggatgccgcactgcacgtaaaacaagagaattttcacgattaattttaggcctaatacaattatatttttgtgcaaactttcccctagcaaaaatcatatctagtaaagtgattagttcaatgttacgcttaatatcatccttcacgtcgtatatttttgcagttaaagcacctaagattgctagttctagattacgtatttgtgcctttaaattggttatttgctgatttagacgaacaaccttagcaggttgaaagtagacggtttgtccaccattagaaacagccacaatagtccctgacaattgatttttgtagtttgctttaattggaatggtagcgtagccctctttttcaacgatcattgcgtctctaatcattttttgattaggtttactagtcaaaaaatgatttaatgcagttttgagttcagtaacagatttctttaagtcgcggcacatttttgctagttcacgatctgcctcatcgcgtacttgaccatgttcaatagtagtataaatagcatcttcaatgtctggcaatagcgtcatgtcttggacatatgcattgagtaatggtgctagctgctcatgtctggctaaaaagcgttgtagtaggcgatttactcgtaaaaattctgctactttttctagatcatcaggagttaagattagtcctttttcagctttagtaattaaatgctcgatatcctcagaactggcaaaaggaatgtgctgccgtaatttcaaaatcttcacggcttcttctgtttcattaagcagttgttctactttatgtaaattgctacttggttggacggaacttaattgttctttggcagcaatagtaattgcctgttgagctaagatatctttaacttgagtaaagtttaagttttgattattgttgatatttttcaatttgatgtaatttccttatgtttaatttaacgctgattgtaactaatggcttaataagtatgcttgcagacatatgcatttcctcgaatttctataatttgatttaaaaatgattgtaacataaaaagaacattaaaatatatactatagtaaaacagttattaaattaattcctatattttatgataaccatattactattgcctactatagcaattttgaaactgtcaaatcttttgtgtaaatagttctttctcgtaaattgattttttaattatttatttaatcaaagtaggattctaaggtgtcctgaacctgaccaaagcctttatgaattcgattgaaataacggtcattgtagctcattgcctgaatgccaataaaagcatcaagcgactgttcagttggaaactctgccttaggcttagctttgcgcttgatcacattgttaaatgattcaatcatgttagtcgaataaattgaagctctgatctgcttgggatagttataaaagaccagcagatctggttctatgtctttcaagcttctgataacatggctgtaaaccttgccccatttggtatagaagtcatgcaggacagctgtggcttcttctttgtttgtctgttgatgcacctgtttgaattcgttcatgatcttttcacgatcgtcgacgcgtactttagcgcagatattgcgcatgacatgaaccaaacagcgttgaaaatgagctttaggataagtcctgaccaaggctgttttcatgccaacaacaccatcagaaagaaaaagctcaacttgctttaagcctcgggatttcatgttttgaagcatctctgtccagacttcaatgttctcgctaggcgcaatgcagtagtcaatgacctccttgtgcccattaggcttgatgccaatggcaatatagactgcttcacgctcaaatgtttctcggcgcaaaggaaggtatgtcgcatccaaatagacgcagaaaaacttgtcgcttagcttgcgtttgtggtaagcctcaacctttggaatcatctgcttggaaatatttgatacctgagctggactgtaatggctgccatacatcctttcaattagatcggctatttccctggtggtcacgcccttggagtaaagcttgataatcatgctttccaagatatccgagtgctgcttgtagtcaggcagcgtgtgctgatgaaattgaccgttgcgatcccggggcacttgcacttcaattgggccaaattgcgtatcaactttgcggaaataagcaccatttctagagttgccagtattccagccatttctggcatagggatcatagcccagaaaggcagtcaattcagcttctaacaagttattaacagcctgttgtagctctttgcgcaataaatcatttattttgtctggattgaatagagcttgagcaaaatctttggtaaaatcattcatgaaggagttcttctttctgtatgtgtttttttgttcaaaccaatcatacgagaaaggaactcctttttctaatgtttaaagaaataaatttaaggaatcattcatccttacacaaactattttacagtctcgcaattttactataacattcagcactagtatctcaactgtaatttttaattacaaatctattatcgtaaaaagggtaaacaaaaaagaccatagtttgtactatggtctatggctatttgttcttattttaattcgagcttatcaatatcaaccatccatgcaattgcaattgatttctctcctaagtgtgtagcgattactggactaaattcagctacatcaactggcttatctggaaagttttcattaacaaattgcttaatttgctccgcttgctttaaatcatttgagtgaaatacaaacaagcgtagcttatctttataaggcaaatttgctgtcttctctaaagttaatttttctaccttagaaacagcacgctttaatgatctgatcttatcaaaagcaacgatttttccttcatcattaaaagttaacaaaggcttgatttgaagcattgtcccaataaaagcaccggcattgcttaaacgaccaccacgacttaagtttttaagatcatctactacaaagaattcatcaattgtcttacgtatctcatctaacttctttaagatagcctctggttccataccattttttatcattcttgcggcagctaacaccaagtagccttgcaatctaactgtcatcttagaatcgtatggatataaattatattcaggattgttatgtgccatatttaccatattttgataaaagcctgagataccactggacaaagtgatagcgataatagcttcatagccttctccgtgtaatttattacataattctatcatttgccccatgctgggctgtgaagttttaggaaaagcagcaccttgtctctccatctcaaaaagctgggtggaagtgatactaacgccttctgaatattccttatcacctacgatgacaggaataggaactacattaatatcattatttttaacttcttgatcagttaagacactagtactgtcagtaactaatgcaattttcaatttattaacccttcccatatctaatttagcatagaaaaattatagcataaaaggcacctatcacgcaccctattccattttttctagggtcatagaagtatcagcgacttgatttaattgcttaataaataaattagcagcatctctgtcaaaatagacaaataataaattctcaatcttagtcagagttttttttagttctttagctttagtcacgccagcttcacttagattcacaatcttgcttgaatctttttccgatctagtgatattaataaagctcatagtcttcttttgctgcaattgacgacttaaggttgataatgaaatattaagcgcttctgccagcttccccatcgctaatgcttgatttttgttttcatcaaaaaatagcaaaattctagtttgtgaaatatttaagccgcatttgtgatttatttcttttttcacttgatctgcgatcgtactaaaaaataatacatccattcgtatagtcctttttctccaatgtagattactatatacttgtattttatcatttaatatggcatttgataataccaaaaggctaatttatcagtaatattgtataatacaatgcactttttatgttgtaatatacaacttaatgatatagcagacctcgcgtgaaacatttactactgtattgcaggtttcaattatgattagctataacttataaatataatcattttagaatctgactaaaaattgatataatattacacgaactttgaggtgatatttatggcatttgatggattatttatccatagtttattaaaagacttagtccctactctggtaggtggtcgcttatcaaaaatttatcaaccatttgatcaagatctagtcttaatttttagaaaagatagaaagaattatcaatttttaatttcggccaatgcacaatatccaagaatgtatttgactaaacaaaacattgcaaatcctgataaagcacctatttttgtcatggttttaagaaaatacttagaaggttcagttttgcaatcgattgagcaagttggcttaggtcgaattgtcaactttcattttagtaatcgaaatgaacttggtgatcaagtcaagctcatgctttctgtagaattaatgggacgtcatagtaatgtcatcctttataatcaagaagacaatcacattattgatttacttaagcgaattaatcctgatgaaaatagagcgcgtgttttactgccaaaagcaaaatatgagttgcccccactaaaaccaggattaaatgggttgactctatcagaaagtgaatttaaacaattaagtagtgaaaaccagcctaatgaaattgctcaaaaaatggatggcttagataaagatgatcgaactgaattattaggctatcttgaagacgattacacttattcatcttttaagaccttttttaatcagtttgacaatccgcgtgcttttattttaaaaacacctagaaataagcgtaagattttttgttatttgccctatcatttagatttagagaaagaaagctctaatccagatctgaatgctggcttagatgaattttatgaatatcaggcaacacgtgattgggttaagcagcgtgcaggacaagttgaacgtgtagttaagaatgagcaaaataaactaactaagaaagttaaaaaacttgagaagcaattagatcttgctgaaaattcagagggctatagaattaaaggcgaaattttaaatgcaaatttggctcaagtaaaacctggaatgactaaagtttcattacctaactattacgaaaataatgctccattagagattaaattagatcctgctctctcccctgctcgtaatgcgcaaaagtattttactcgttacaaaaagttacgtgattctattaagcacattaatgaacagcttcgtattgctaaggatgatattcgttactttgattcaattcaaacagctattgacaatgcggatccacaggatattgatcaaattacagatgaattgattaatcaaggatatttacgtaaacaaaagaaaaataagcgtaggaagaaaatcattgaacgcaatttaaatgaatttaaactttcatctggtaaacacgtattggttggtaaaaacaactatcaaaacgattggcttactcttaaaaaagctaataaatctgattactggtttcatgttaagaatatgccaggctcacatgtgatcttacgcgatgatcagcctactgatcaagatattaaagaagcggctgagattgcagcttacttttctaaggctaaaaattccgctcacgtacaagttgattatgtgcaagacaagcgtgtgaaaaagcctaatggtgctaaaccaggatttgtaatctacactggacaaaattcaattgaagtaactcctgaagaaaaggaaattatgaataaaaaaattgaaaaataaaaatcatcgaactagttagttcaatgattctcataaatgcaaagtcatatcgactttgcattttgttttgcttattaaataggttgagtagttaaagccaatgattctagaacgtctaaaatcaattccgctgtttcgatacttgagaaaacaggaatatgtgtattcagcgcttcatctctgatgcgcgatgcatcttcgctagctgcatcagacaaattagtaatattaacaaccatgacgatcttatgttgacgaattttatctagtagatttctagggtctttatgaaccttctccactactccagtagtaatcccagcttccgcaaacatattagctgttccttcggtcgcaattaatttgaaacccaagcgatcaaatcggcgagctagttgggtcacgcgattcttgtcttcatctctgactgaaataaagattgttccataacttggaatatgtaaatcacttgcttcatatcctttgtataaagccttagctagttgagtatctcgacccattacagaacctgaggatttcatatttgaatcgaaagtattaccacttgaataattaagaaatgaaaatactggcattttaatatgaataaaatcgctgttttgccatagaccattaggatatcctagctctgctaaatttttgccaattaaagcttctgtagcacaagtagtgatatccttatctagtgattttgataaaaatgctacattatgacctgcatatggtttaatttgcaatagatataggtcattatcaacgaataaatagtgcagattaaaaataccttttgttttcagctgcttaattaatttaattgactcttgctcaatctttttttgctgctcttcggttaaattttgcggctgaatcactgcaattgaatcagaggcatgcgaacctgtttgctctagatgttcaattataccgggcaaagttacattggtaccatcagagatagccgttacctcatatttgtgtccctcaataaagcgagaaatagttatttgatcaagttgattttttgctaaatatttctctattgcaggaacatcataaacaactgcagatttttgcttgttttctttattcataccaccaattaaaagtggaaaaccatatttagaagcaaaagcgaaaacctggtctgtatcagttgttttatttaatgccgggacccgctttaaggtagtagattgttgatcaagcaaagtagtaatcttatcccgcggatcgtcgtttgccttttgcccaataacgtgcaaaccacatttttccaactctttactcaatgcactgattcttttgccagaaaattgaactaatacatcagaaatattttctcttttagcaacagttagaatattttcaactgtaatggaatcaaaataaactcggtcaatattcttataccttgatgaaatcgattcgtcattatttgatagaagcacagtaacatagccatacttatgtaaagtatcggccgcgtgagcaatcatatagtcaaactcgctagtaaccgaaacttgaagcggcaacatgcccaaaatcaagatctttttttcagcatttaaagcttgtgcttcattttgaacatcatatgcactgtagtaagcacaaacattaggtttatatatacctgctgagccgtcgatcttcaaatatgatggctgcaagtcaattttattaatcaaagagcgaacttcagtaactgatttttgtaaaatcttagctaataatgggttaaagaatccatagactttagcttcttgcagcaaatcacgcgaaggctgctccttctcttgtaataactttttgccaagtcttacaatgtgaagcaatttctgataataaaccggatgcaaatgtgttactttttgtaattcagaatatggaatatcttgatcaattgcggctaataatttaactaaatgcaattcatcaggatgtgccaaatcattcaaaatatctgcagtggatttttctttttcttttataaaagcatgccaacccaattctaaattaatagttgcatctaagcctttcagaaaagcagtttcaaaattacggcctacacccattgcttctccacttgcttgcatgcgacttcctagcaaatagtggttatagccggattcagcaaatgaccaatatggcattttaattgctactgcatctaaggtgggttcaattgaggcattaagtccagatagaggatcggtaatctcattcagtcgataaccgatagcaactttgctaacgacatatcccacatcatacattccaattctttgagcccaaacagaacttcgcgtcaaacgcggacgaatcgtcaaaagcttagatcgaatttgagttccatggtgtttaatcgcaaaatgaaaactagcaaatccaatgagatcaagattagacatgatttttctaacggttattcttaactcttgaatatgatcattgtttagggttaatgatggcatcacaactgcagagtcacctgaattaatacctacagcttcaatagatcccgcaaaattgataaaagctaaattgccatccttatcacggattacgtcaacaattacttcttcccaactagataagtcttcagttaagcgataattcttccatgtaaaattatcattttgcttttcttctttaaagtaactgattaaatcggtaggatttgcaaattgcaaatgttcgttgtgtacaaaacggttgtacttagtaactaatacgggaaaagtgactttgtcgttaatgctttctagcgcattatctaaattatcctgaatactctgattaagttcccaagattgcccggtatcaatatgtagcttagtaagcaactctgtctttttctgttgattccccatttgtagagcacgcgaattcaatgttagtaactgaattcccatttgttctaaaacgccatcttgtaataacttatgtgcaacctttaaaccattagttgaaccataagctgtcataattgcatctggctcttccatccgtagaattcttttcaggaagtcgagagtcatcggttcaagatagactgttacaccaagttttttatcagttgaaattgtagctggattaggattgactagcacaacttgaatgccttcttctgtcaaagcatcaattgcttctgttgccataagatccatttctgctacactaccgattaaagtagggcctgatccgataattaaaactttatctaaatcgttttctaatggcatataactaccccatcatctgtaaaaaataatcaaaaatttcatctgcatcattagtgcctggtgctccttcaggattaaaagcagtggcgatcaatttgtccttactgttccagaagcccgccatcagttcactgtgtagatcaaagtattcacgattcatattcatcttcacactatcaggcaacactagttggtcaatattcatcgctgtttgccagatagcattactattttgttcaatcactggataattaataccatcaaattcttgtggtaattgaaccagttcaaagccgagataatcgctcaaagttaaaaaacctaatccgattcctaaaattggatacttaccataaaaatgatctaaaactggcgttagctgattaattacttcttctggttttcctggcccatttgaaataatcattccttcaggacgtaagttttcaatatcaatcggactggcactgtatggtaaaactgtcgtatttacttttcgtaaagataaagcacgcagcattgagtgctttagcccaagatctagcacagctacagttcgtccaacattaggggatgcatatgcattcttagttgaaacagtcgcagatttatttttaggtaaaactagtgctttaatctgatcaaaggcatgctcgtcattagtatccatgatcgaagccttaattgtaccttcttccattaagcgatgaactaaagcacgagtgtcaactttgaaaattgcagggatgttcttttctttcaaaaaagaacttaaatcttcaaaattttcactatctgaaatatttaatgcaatatcgttagcaataatccctttaactacgggatcaatactttcataatcaatggcattaataccgttattaccaatcattggtgaagtaaagactaaaattttaccagcattagtaggatctgttaatgcttcttggtagccaaaattagccgtttgaattgctaattcaccggttgaaataatactggcaccaattccttcacctggaaatgaactgccatcttctaaaatcaaataccgtttcatattatcacttacttgtttgttctagttgagccaacgtttcttgaaaaatttgtggtggttctacactaaactctagccattcgccagtacttggatgtttaaatcctaatactttagcatgcaaaaattgaccatgacctttcaaggttttacgtggaccgtataatgggtctcctgcaaccggatgtccaatatagtcaagatgaactctaatttgatgggttcttccagtttcaagctgacactcaattaagctataatccttgaactgctcaagcaccttgaagtgagtaatagcttttttgcctgtttcaactaccgccattttcttgcggtcatatggattgcgaccaattggtgcatcaattaccccattttcttccgcaaaattaccatgaacaattgcccaataaagacgtttgttagtcttatgagccaattgatcttctaatgattcacgagccttggcggtcttagcgatcattaataaaccagatgtatctttatcaatccggtggacaattccaggacgaaatccttctggtgattgtgctaaggccttggtgtgatataacaacgcatttactaaagtatgatctggatgacctggtgcgggatgcactaccataccttgaggcttgttaactacaatgacatcatcgtcttcatacacgatatcaagtggaatattttcgggtataacatctaacggtttaaccgctggaatattaacttcgattttatctcccgcctgaatcttataagatactttttcgactttgccattaactaggatattttggtctttaaccagttctttaactctagttcgagatagatcaggaatttgttctgaaacaaacttatctaaacgtcccttttcgttttttacttcaagtgaatattctttagtcatgttgttcttccttaccttcaataaaaattaagtaaatgaacacaaggattactccaacagtaattgcggaatccgcaatattaaaaatgttgaagtgaacaaaatcaagctgaagcatatcaactacatattttaaatgcaaacgatcaataaaattaccaacaattccacctaagatgagggctaaacccacatcaaacaaggtattcttgtactttttgttaaaaagaaaatacaagcaaacactaatggcaataatactgataatgtaaaaaagccacatttgaccagttaaaatgttccaggccgcaccattattttgcaaataattaaaggaaagaagcccaggaataatctggtgtacttctcccacagcataatgggcaacaatataattcttaagtccttgatcggcaagaaccacaactaatgaaataattaaatataaaaactgcatatctttttagaataatccgctaattttaccattgttatcaacatcgatatctagggccgcaggatgcttaggcaaacctggcatatctagcacatgacctgtggtaaccacgataaaatgcgcaccattttttaaactaatccctttcacatgaagcttaaagtcagttggagcacccaattcgttcttgttgtcgctaaatgaatattgggtcttggcaataattactggtaattgggccttacctaactttcttaattccgcaatttgcttttcagccttgtcactatattcaactccagctgcatgataaatcttggtagcgactttctcaatcttgtctttatcatcgtcatcatctgcataagttggagttaaatctgccttgccagagttagccaaatcaacaacagcttgagcggcttctacaccacccttagaaccttcgccatgataagtaactacttcagcattaataccttgttcttcaattaattgtttaagcaaagcaagttcttggtcagtatctgaagcaaaacgattgattaacacgatgaccggcacattgtatgaacgcatgttgttcatatgacgctcgaggtttttaaaaccttcttttaaagcatctaggttttcttcatctaagtgatcagttgagcctaaagcttgatacttcaatgcacgaacagttgctacaactactgcagcatcgggcgtcttgtccagatgtcttgagacaaagtccatgaacttttgcccaccaagatcactaccaaagccggcctcagttaatacatagtcgcttaaatgcaaagccaagtttgtcgcaatgacggaattggctccatgcgcgatattagcaaaaggcccccgtgcactaatgctggtgtgtgttccaaggtctgtactaagttaggcttcagcgcattagacaatagtgcagcaattgcaccttggaatcctaactgtttaacataaaccggttcatcatccttagtgtaaccaactagcatgtcaccgattctactctttaaatcgttaatatcagttgccaagcagagaatcgccatcaattcgttggctacagtaatggcaaaactagcttgatgttcaacaccattaaacttggagccttgaccaaccgtgatttttcttaaagcacggtcattaacatcaagcccacgcttaagtaaaattcggtcaggatcaagatttaggctattgtcttggtagatgtagttatcaactaaagctgcaagtgtgtcaattgcggcagttaaagcatgcatatctcctgtgaagtgtaggttgatatcttccatagggatgatttgtgctttcccaccacctgtagcaccgccttttaatccaaaaacaggtcccatcgaaggttcacgcaaggcgatcatcgtattctggtgcaactgattgtgaattgcatcccccaagccaattgtaatcgttgacttaccttccccagcgggagtaggagaaattgacgttactaatactaatttacctaactttttactagcacgagtcctgttaatggcttgccaagtaatcttagccttatcatgaccataaggttctaagtcttcctctttcaagcctaccttagcggctatttcattaataggtaattctttggtttcttgtgcgatttcaatatctgatttcattattgcttattcttctttctagacatcattaaaacagaatagctttggtaatcactttttagttgataaacttgaaaattacgccaacttgaaagcaaagtcatttgattgatttttacttttgaacgatatggcaacttgagtaatattttgtctccacccttttgcaagtaagaaaaggaccaagtataaactgctaaaagtaagaaaatgataccaactactattccaggtatactaattgctttgttcccttcatagcccaaaataaaggcgataaatagaacgattaagagccaagaataatagataattcctgcaactcctagaaacatgaaatgccgtttagattttagaatttagatcacaccctatttatttaatcatgtctattgtatcaaagatttaatcaaaataagagggttgaacttacagcaattaaatataagtccaatcctctatcacatttatttactttactactgctatttcgtctctaacctttatattgcttgaatcgatgccaggtttttgaccgtgaagattaaagtctaaatcaactgtcggttgaaacagtaaatgtactcattgaaagctcagtagccttggtatttttcgctgcttgaccccatgctctcaatactgcttcgggaattcctttagcattagtcaaatttacgttacttaatttattaccaacatggccgaaggaatcaccattatcaccaatattattaccaaagtttacattgcttaggtcaatattggataaattactatcgccatcgaacaaactagcaatcgatttagcattagataaattccaaccactaatatttacagattcaagacttttatcatgaccaaatgttgcataaatattagtaacacgacttgtatcccaaccacttaagttaatactttttacatttggaatactagaaaataaaagtttcagattagttacattggaattcaaagttgtagtagttaaatcaatggcagttgcatttggttctttattgcttgaacgtatccattaactatttctctagtaatgttgcgggcatttgttagatcaacatcagttaaggcattattatgtgcaaaaaagttccaagcgtttaccacatttttgtatacagtatcgcttagatcaactttcacaagcttttcagcgccactaaacatttgtgacacgtcactgaattgacccatattccagccagcgatgtttacattttcaagattcttgtcattttgaaacatagatctaattgcagtggcttcactaacatctaaatgacttagatcagcagactttaaagtgtcactgttcattaaggctgcggtcatgtcacccttagcataaactttgttcttatctccctcactgtcaatagtaatgttaactgcacctgcatctttgatagtttctaataagtctttagtgatatagactttatcatcagtagttattgttcctgcattgataaaatcttgggtattagggatgtaaatatttttattaccagtacccttatatttagttaaagtgtattgatgagaattttgatctaaacttccatcccaatctgcagtgttgtactgactattttgagtggtgttagcttgtgtcttactagttgaagctactgtagtagcttgcttattggtagaagtcgtactctcctgcttgttttcattagtagctatcttgttcttactttcaattgatgatccgacatttgagttatcatcgattgaattgttcttagtagttaaatcagtatttgaaagatcaactttgttagtcgattttgtcttcacaatactagtagtgtcttcagttttattggcaccatttgtatctacattattagaagttttagttgtggaagcaacttgctctgtagtagtttggtcctttataacactggtagtagcactatcagatgaatttgcatcaacactatcagcatgtactgtttgactagagtaactcataaaagtcaatccaattagtacagaaactgcaccgattgttattttacgaattgaaaaacgttgtttaatagaatcaatattattgtttctaaggaaatatcattaataaaaaatgaccgagaaattaatctcagtcatcttcttatcaataagggtatctcatttctactaccctactcgactagtaccattagcataattcaaagttacgccatcttgcacgttgaaaatgtaaatattgaaatgaactgcatttgagttaaccgactgcccttccatttcaactccgcgagccaatagttcattgccacgaaagaccggtgtcacacggtagcggacgtagttgcttcgactttcttttacataatcagcaacctgatcctcatagcgcaacatatcaggatcatttagctgccttgtacctgtcatcaaatttttaatgttgttgttctgtcctgttagctgataaccaatcaaatggcagcgattatagagccagccgccagcaactcgtttattatgccaaccagtaggatcaacatgtagtggttcgcgtctagcgcttggcatcagcgactgaataagcaatgcgtttgcggcagttacccgattcaaaccatcgaggttaccatattcttgccatgctccgcgattagtactcaagtcactcttagaaaaactaggatcgttgttatttactgtaatgatgtttttcccagaatagttaagacttgccagttttgcggcactaacagattcaatattgtgtttgccagtgtacttcttgagttctttgcgcagtttagcaatctttttgtctaggctaacaattttcttttcagtttgcttgttttcctgcgcaatttgcttggtctttttctcagcactgtggtcatatttgatgatagttttaaccttggcgatgacattttgacttagactaggattagtaatcgcaccatagccgccaaacaaaaacaacgtacttgaaacaagtgtaataattttcttcttattcatcacctttttgcctttctgtaaccagcattgattgcatcctgctcactattgaagtaaaccgcatttgcggaattcatatgatagcctgcttgtcctggtacgtgataaatcttagaattgacgttaccgacaattttgccagtttctgctgtatctaggtctccatgattgccgccaccattagaatgatgtgttgcagttgaacgactagattgagctgactcgttttgccgtgattgttttgctatttgagtagcttttttagcagctgcttttgcctgttctttttgctccttctcttgttcttcttttttatccttagcatctttaagttcggagcttagcttatcgtactcatccttcttcttcttttcttcggctaattcaaaagtctgctcttctaagacttcttcatcagtagtgcttttctcttgaaacttcttctggtgctcaatatatgctggttgagaatgtactaattcacgagtgatgtttagaccatatttatttaatagcagtttttcagtatcactaattttataaatacttcttcttggtgagattagtaaaccagctaattttaaatcactaagcgcccaagctactcgactaattgctactaaatcatgatatttagaaggatatcttaaattaacaagttcttcaggtaaattaatctctgtgacaacagcttatcaagctctctacctacccattcttctttagtactcgctacctctagcatgggacctaaaaatgcatcccaagttggcatcccattttcactatgttttaaagttttgtagtcaatcattttttatctttatcaacttaggcgtattactgtaatgtgttcgcccagaagcttttatattaagattgactggttgcatcaaatttacgctagtcaatattgcctctcctgactttaaactcgacaactgagctaatttgtctttatttaggaaattattgattgctttaatttcatattcaccagttaaccgatgcattaaaagtgttcctatctgatttaatactatagttggcacatctttggggctttgagtagttaaaaatagaaatattccattttttcttccttctcgtgctaacgtagccagaggagaaataaaatcatcttgagcatctttttctaaagcatatctgtgaacttcatcaacaaataataaagttggatgttttgtcatatcatgatttaataagaaattacttatatagtctacaattacttgtcctaatccaattgaaaatttggaatcatttaaacgtatatataatgatatgtcattaccttgaaattctaacatttctttattaaggtctttgagtatctttttacctttatctgtttctccaaaatccttatcttgagttttactatctacgtttaaaaataactcttttagattatacgtcttaatcaaatattttactttacgtattagccaagaattagctccatatgtaaaataatcaaactggtaggttccttgttttatacctttattccaactaagttttaaagaatctttctcaatttgtttatctaaattgtttatatcaaatgattcattaaaaactttatcagattcccactgaatctgaagatgcttgtactgttcttgatttgccccttcacagtcaagaatatcatttcttataaatctattctctgcctcggttaaatttaccttatttaaatgctttttatagtattgaacaaattttaatttttttattgcctctaaaagctcaatcacttgggaattatcatttggcctaaataaagaaatccattgttcatcagtcaaattagcagtattcaagaataaatttttccctattgtttttaaattaacctcattttttgaaaatgcatctttatattcaccagttggatctataatcaaaaattttccttttagcttttgatatttatctaaaatcgctaatgcactagttgatttaccagaattcgttgctcctacaatcataaaatggtgattaaataatccatcaacactaattttgaatggaatagctttcttttcatttaaattaaagcttgaaaattcaatttgattatcccttttattaatttctaatgaatttatatatttcttaatagcttcatcattacagatatatgccttatcaccaattcctactgttagatctccgggcaatacaaacgtatttttatcgtacattgccattagtttaatttcaatatttgggtaaataatatcatcattattttctattactgccttatgaatattatcagtattattaatcctagaacttattactttccctaagaaaattggagactgtaaaatagtttgtgtaaggatgaatgattccttaaatttatttctttaaacattagaaaaaggagttcctttctcgtatgattggtttgaacaaaaaaacacatacagaaagaagaactccttcatgaatgattttaccaaagattttgctcaagctctattcaatccagacaaaataaatgatttattgcgcaaagagctacaacaggctgttaataacttgttagaagctgaattgactgcctttctgggctatgatccctatgccagaaatggctggaatactggcaactctagaaatggtgcttatttccgcaaagttgatacgcaatttggcccaattgaagtgcaagtgccccgggatcgcaacggtcaatttcatcagcacacgctgcctgactacaagcagcactcggatatcttggaaagcatgattatcaagctttactccaagggcgtgaccaccagggaaatagccgatctaattgaaaagatgtatggcagccattacagtccagctcaggtatcaaatatttccaagcagatgattccaaaggttgaggcttaccacaaacgcaagctaagcgacaagtttttctgcgtctatttggatgcgacataccttcctttgcgccgagaaacatttgagcgtgaagcagtctatattgccattggcatcaagcctaatgggcacaaggaggtcattgactactgcattgcacctagcgagaacattgaagtctggacagatatgcttcaaaacatgaaatcccgaggcttaaagcaagttgagctttttctttctgatggtgttgttggcatgaaaacagccttggccaggacttatcctaaagctcattttcaacgctgtttggttcatgtcatgcgcaatatctgcgctaaagtacgcgtcgacgatcgtgaaaagatcatgaacgaattcaaacaggtgcatcaacagacaaacaaagaagaagccacagctgtcctgcatgacttctataccaaatggggcaaggtttacagccatgttatcagaagcttgaaagacatagaaccagatctgctggtcttttataactatcccaagcagatcagagcttcaatttattcgactaacatgattgaatcatttaacaatgtgatcaagcgcaaagctaagcctaaggcagagtttccaactgaacagtcgcttgatgcttttattggcattcaggcaatgagctacaatgaccgttatttcaatcgaattcataaaggctttggtcaggttcaggacaccttagaatcctactttgattaaataaataattaaaaaatcaatttacgagaaagaactatttacacaaaagatttgacagtttcgaaaattgtgccattactatcaatcaaaacatgataattaatagtattagggcgtaaaacatcactttgattgaagcgatacttcaataaactcatgttttctatttgaatattagcaaaaatagaagatacagtagatattttacctaaatagtattcacatttgtctacatgcaaatttttgtctgaactatcaaaaaagttatctatcaaactcatagttatcccacataataagataaatcataattataactacacattgttgctttaagaaaagcaatattatatcctcgatctctcaaatcatctaaatcactccagttgtcattaacatcttcttgttctgtttttttatcaaaattatgaatattataatcagtaatcaaacaatctaaacttgagttatgcttaattgcgtttataatcattctacttatgtgattatcaccaaaactaaaacccgaagtaactaataatgtattaggttggtgcaacttattttgaaatcgagacatgagatcaaaatagggttcctcatagctctgagcatatttattagaacttggaaaaatcatttttacatgattactgttatctctaatcgtactttttacctcttccacagtcgatttagtaactttattttctttttcaatccaattaatagacccatgaattttaagaagatctataacatgctttttatagataacttgtttagtattaatattgttaacttctttactcaaaacccactcatacatatcatcattgaattctttattatttccaaattcaaatccatcaaatattgtgaagttatctttttccagagatttttcaattgctaaatcataatttgtagtcgcaaccatcaatttactgctatccgaatgaattaaattaagcaactttaaaatcactttatcatgcttaaatggcattttagatgtactatcgaaattataatcaactgaatcaagtattgatagtaaaataaatctttttaatttttttgcttgtgataaacttggatttctgacttttttaccagacatctctgcgtcttgaatatataaatttaaatttgaaatatattcttctaatggaaaagaaaaccatgtactttcatcatcaaaattaactttttcaaatttttcttgttgatctttaggtaaaaagatcttagcatccttttcatctaaatattcttctaaattatttgttccataaagctgattgaaaatattccatgaaatatcttgcatagtctttccataatttgaattaatatttccattctcattagttacaactgaagctccggcaccaactaatagcacaacattactataatctttacttataaaacgcaaaacagcccttttgagaaacttatgaagttgcttttctaaaaacacaaaatcatgatcattatcatcatctggatttattttatctctataaaatttacttagtgctttctttttatcttgtttattatatttatcaggtaacgataactctatatctatttctttatctctgtacaactgcatacttaatctcctcgtattatataaattcatctcttaaaagttaattctaatatataaacaaattgtcaattttatcaacaattctattctgctccgctaatggtggaagaggtaatttcaaattaattaatttactcaaatatattcctttttgggttgtccctttcgcattagcaaaaatttgagttttaaacattgctgaaattaaaacataataaagaaacttacttaaaatattactactaataaccgcaacacttctttgagctgtaaaaagtttatcagtatcaacaactgcagcattacctaacgagcctacaatagtgagtaatacatctccctttcggatgtttgttcttttatcctcttttaaaaattgatcttcagaaacaaatctatttgataaagaaaaatctatttttccttttttaatgtttattgcagagataacttgttttccttcatgtgaattcggtgggggattatgcgtaccatcagtaatcctttttgcaatattccccaatctaacccattcccaactatcaggaatatcaaacggcttttcctcatcagtgatcggaggcaacggcttgctcttcttgatctccttttccttgatcatcttccgcttctcagccttaatcttctctagcaaaacactagctggttcatcatggggatcttgctcgactaattttccacgcattgccaaatccagcaccttcgacttcagcaaagtctgaagttttgcgtattgttgagtagaagattcgactttgcgaagcaaagcgaatagctgcgctattttagcagcgattcgactttgcgaagcaaagcgaatagctgcgctattttagcagcgattcgactttgctcttcaagtggtggaagtggaacaagagtttctttcaacttttttgaattaattgttggtacagcagatccttttacaaagtcttttatgtccaagcttaaaaacagatagaatatgaacttgtgatttaagtcattgtatggtattaatcccccagtattaagatcaaccaatgaatcttgagacaaaattcttttttttgcggttaatatagctccaccgtttttaggaaaaataattgtatttttaggcattacttgtcggctatatttttctccaacccaatttttcacgttttccatatataagttattattattcatatctttaaccttaaagtatggataaatattatcactacttatgtcttctttcttgggagtttttccattttttagtaaacctacatcccccaatctaacccattcccaactatcaggaatatcaaaaggcttctcatcatcagtaatcggagcaagcggcttacttttcttaattttcttttccttaatcaactgctctttttcagctttaatcttctcaagcaatacactagctggttcatcattaggatcttgtggcaccagctttccgtgcatggccaaatccaagattttttctcttaaagcctgtgcatcaaaatctaaagtattagtcttcatcgtcaattccttctaacgccttattaagttccgcaattgcatccctaattgccttagacttgtcattcatctcatctaagatttctttcaacgaacggttatcgtgctcttcttcatcattcatccaagaaatatcaaggctagtattaggacgcttcaaaatttcatcaatcgtaaacttgcgccatctaccgttagaattcttctctttatcccaagtttcttttctctttgagcgatcgtcaacgcagaatagtttttcaaattccgcaaaatccttgtcacttaatggattacgcttaccaaatgaccgcatctgatgacgcatatcataaatccaagtttccttggtattatccttgtcactttcaccgcgagtaaagaataatacattggtctgcacaccttgagcgtagaaaatcccagtaggcaatctcaagatagtgtgcaagttgcacttgttgagcaagtcttttctaattgcttcgccaacaccatcggcaaacaatacattatctggcacaactacggctgctctagctttaccattgtgtttaagtgaattgtagataatctgcaggaagttcaattgtttattactagtcttataagttaggtcgtcacgacttacactgtcgtcactacccttcttggtaccaaatggcggattagttaaaactacatcaaaatctttcatccatttaccatttgaagataatgaatcccctagttccaatcgtccatccatgccatgaagatactcattcatcatggctaaacggtgcgtggtttcaactaattccataccagaaaaagcttcttttacttgaaattcttctttatctgcggacaaggttgaataatcatctgtttgatcttttaaatatctgtcagctgctaccataaagccaaaagtaccagcagcagggtcattacagcgatctccaattttaggctgagtcattctaaccatcatgttaatcaacacacgtggggtaaaatactgacctgctccagatttgacttcgctggcgtttttctccattagaccttcatacaaatcaccaaggccttcgtcacgagctgaccaccaatcaagtgcgtcaatatcttttattattttttccaggtcagcaggtttgtgaattgaagtagaagcatcagcgtaaattgaattgattcttggactattaaccacttcaggattacctaaatcaagtaataattggcgataaaagttacttaactctagtccttcctttgaaacaagattatcccattgatatttttgggggatatcatcctgttcaccttgttccttactcatttttaagaataagatataagttaattcagtaatgtaatcttggtaactgacaccatcatcacgcaaaatattacattcattccataacttttgaacgatttcttgattgttcacttaattttgctcctttaaaaattgtctcttttgaagatttccggtagatatatttgaatattagtaaatggatcatcattaatccagtcactctttttccgatacaacttattggcgtgatctactgcatcttgcactttatcaaaaatatattctcgataactattacctttaaagcgactataatcttgattaaaataggcagatctagacagtttctgtactagctcttttctagtataagaacgagtgacactttcaaaatgcattaaaatccaaatttcaaagtctattgaagaaaacataatagtaatatcattttttcgagcaagtttagcgcatttccttaattcatctttagaatgctcatctctatcgaaaacaacataagttttatctaaatgattatatttgccaaacttaactgctttttctactagacttttaccagacaaatctgcagcaactattttaactttaatatttgctaaacgatatttctgcttaagcatagtaaaatattttttttcagattcaccttcacacagaattccaataattggattagacttagtcttatttcttattcttcccatgctcatccccatatttttcatgaatcatttgcaatacatctagcaaaccatctacatctattacaggaactgcaccgaatcggccttgtaagtatctcttagcaaacgaaatatcatgtcgacctttattacgtgcatcttcaaagtcaaagattgatttcaaatcactaattccgtgaaaatccttgtctaataaataaatttgatcaattcttaaatcgctgtctaatagctgaatatcatgagtagtgataataaactgattcaaattttctgttgaattaaaaatacgaactaaagcagctgcaagttcaacatgcagtgaatcatcaaattcatcgattacaatcgtcttctcgttaccattcatttgagcaagcatcattgctaatactatataaaataaacgacgtgtaccaacagactcttgtgttaatggaagttccccagaattaataacttcattttgatgataaatcttgtgaaccgtatatagttctttagttgttttaggataatcaatatttaaattctctacaatcttttgtaattgtggattcaacggattagtaggtacttctctaattctaatatcagagatattaaaatccgcaaaacttaagaatgagatcatttcttttttgaggtattcatcttccatcaaatttaaaagttcgtcaggaatatttactggatagccgctgccaataaaaatcagatcattaacaaaccacttatagatagcaatacaatctgcatcattttcagattgtgctaaatataggaataaagaattatctctaagcttaggaatgctgtcttccaaaagcttgttagagacttgaatgtcatttccatttcgagaaaaaatttctttttccttgttaccactaattaaggttaatgcttcactggtaatgctctctcgattgtaactaaatgaatagtcataaattttgttttttaactcaagcttcacttcaaagtaagtatcttcaatcttggacttttcatcaaacaaaaaaggataataatttaacttatcagttacggcttgagttggacgtgttactattccttccattgtttgtaaagcttgaatcaattgagacttacctgaaccgtttggaccaaataacagtaagctttttaataatgatggatttttacttgagaaagtattagtttctttcaatttacgtagtctattgcctgtctctgcagacaaggtagtgcgctctctaaaagaagcataatttttaacagtgaactcgattaacatattgtattcctccgtgttaatttaagtttagcacacgcctttttttatcacaacttttcgtgattaaaagcaaaaaataccagtaatggcatttttaaacatataaattctcattcaacacgtaaataatctgatcagcattttctggaaagatcttcttaatttgcttataacccccgtgacgtttaaagaaatagttatcatcaaaggctttctcagcatttggccccaatacagtagatgaaattaattggttctcaattctcttcaaccatttcttttgaggaatagtccaatcagctaaaccataaactttttgcatggcattatgaattctaacatcatgatccaccaactcagatccagccgcagcttgtctaatgaagctaataatatcggcagtggtctgaacatggttaacgtttttccatgcactttgcaaatcattttctttaaagccattttgctctagcttaagtttaatatttttgagttcatcaaaagttaaatccttcggtctagtagctacaacttgtaaggctggaatagtattgacgttttcattaacgaatttattgaagttttcaatataatccgctggtttttgattgccatgcccataacctcgacttacattaattactttgtctactgcgtctgatattatttgcttgggtttgacaggtttgatgtgatctaactgctcaaacttaggccattgctttaaaaattgggacttatctaacttacttaattcacgggcccattgatcaaccgaattaatctcagctagatgttggaactcatcacgtttagtatcatccaaacgtttaatttttctctcaacggcaccagccatatctacttgatactgagcggaatcctcatttgtctcaaagaaatcatccttgtgatttaagaagtagtgaacattatgtcctggatttttaacaacaggcttcatgtttgtcactttattcattgcttcatagattccgacggcatcataaatcgtaaatttggatttattaatttcgggacaaagtctggttgcccgtcccaacatttgctcatagaggattcttgactgaactcttcttaagaagacaatactagtaatttgcggtacatcaattcccgtagttagtaaatctacagttactgcaatattggggttggtttcattcttaaagtttttaatttcttgattaggatgccgaattgaaccagtaattttttcgatagcatcgtcatctacaggattactcacttttttgaatgcttttttcaataagtcaacaaccatatcagcgtgttcatcagttgccgcaaagattaaagttttacctaaatttggatcatttggatcaagatatctttgagctaattcatcacaaactacttcattaaagctacgtgtgataactctcttattaaagtcttttacatcaaaattcatattatcaggtaatttttctttattgatagttttttcatcctgatcaaaaagactaacttcggcaccctttttaaaatgaatcccttcttgagacaattgagtttgaataattactggtgcatcatgatccactaaccagccatcgaggacagcttgttggtagctatacgaatacaccggtttgcccaaaatatcaatcgtttgtaaagctggcgtagcagtcattccaatagcagtcgcatcaaaataatcaactacacgtctatattgactaacataatcttcttgactatagaattgatattctttatcgctgagctctttatcttctgcataaccacggtgggcttcatcaacaataatgaaatcatattgaccaacggatggcttatcatcactgtcttcactgaaaaataggcgtttgatcatcccctgaaccgttgcaatttgaatttttgttgatatttcaggtgccttatcactcaattcctttaatccataaatggaagaaattgacatcgtacctattttattatctttaattgcattggcagtctgctttcccaatgaattacggtcaactaggtaaagaatacgtctagctctcttatgcttaagtagtctgtacatcaaagcaattgccgttctagttttaccagtacctgttgccatggcaagcagaatacgcttttttccatctttgatggcattttccatcgcttgaattgcagcaatttgatattcacgatgtgcaaaatcaggaaaatcttgatcatctaccaagtcttgatttgcttcttctttatttttagcagaaagcttcaacgataaatcttctggcttatgaaattcctctagagcatatgcgctttctttatgattacgtgcatcccagaaccaaataccagatttttcctgatattgtttaagatatggacgaccatttgcagtatagatgaatggaactttgtaatcacccatttcatttgaaactagacgataatctgatctaaacggtacctctttagaatattccttaggctgtgccatttgccctacaatatcttggtcccactttttggcctcaacaattccgtagaactccaaacctttgaataatgcataatctgctcgctgaccattaggtagaacccattcagcaattgccatattgtgacctttttgcggttcagttttctgcgtccaattgttcaatttttgtgaatctacttcccagcccgcatctcgcaattgttgatcaattaactgacgtgtttctgcttcagttaactcatgttttttagcaaattgaacgttaatctggcgtctgcgttcacgctcttcaggagaaattatgacttcctgcaccctattttgttgtaattgctttatcttttcttcgagagctttgattttatcttcttgagttttaattaaagctttttgatcttgtggctcaacataatctgcaactttatccagagaataaacttctaaaaaccatttccataccaaataagcactctgatcaatttcaagcgcaatctttttggtagcaataaaatgatcgtcatgcgttgccttgttccgtcttaacctgatcaaattaagagcattcaaaacagtaggtggatattcattcttagaatatgccattttttcaattcgttgtttttggtttaattcccaatcacctaaatcatccaaatgcatgatttctttagttaattgctcaccgaaagtaccaaaaactgtcaaactacttctaggatcagagtaaattaagctttcagcgctggaagccaattttgcgtattcttgataatctttttgtgaagtttcaaagttagacattgtttttcctctaatattaaagtaaatatagttttattctacctcgaagccccatttaataacaagtagtgtaggtacaaaaaaagaagcaccaacacagtgcttcttttaacataaactaaataatcaatcgaaccctacttcgccaaaacatattcaaatcccaacatattggtatagcgattactacctatcttaatgtaatcatagcctttgatcctcttggtgccataagtttggacataattctttgtcctggtattctttgacttgatttcggcaacttttttaccctgggcatttaccacaggtgttacagtttgcacagtgtagtaatgtttgaccacttttagcttagatgcttcgaaattaccatacttaacatatttatttacatcaattttgacatttttttgccctttaatagtcataattgcttgaattttgtaaggggtccccttcttcagtaactttttcgtctttatacctttagcagtataaacgtatgcattactttgcaatttctttttcttgccaacagtaatgccatcagtgattaatgggctaatatcgactttgcgctttctaatggtatctgaagaatagccaaaccaaaatggactcttcttggtaacatcccatactggacgagttgttggatattgccaattacgtttgctgttataaagttgaacgtcaagctcacctgtaacttgaggctggtaatagttgtagatcaggttcatcactttttgaacctcataagtagttaactgatcagttcgtctaacgagcaactttttaccatcaagtgctttagtcgtattagttaaaaacttgtcagcttgactaaccgcaacttcactggcatttgtctcaccaacaacagttttagcattttgcaaataagtcaagaactgtatctttttatcatagtcagctaatttatagcgatcagtcttttgaaccttttctgcagtggcaattgcagtagacaatgatgacttattagttgccaccttgctttgtgattctgcttcaccggctgtgttgattggcgtaagttttactccctcaacctttttgacattactagccaagatatagccttcattatctaacttattagttttagcattagcttcacctgttgtatggtagaaaagttcagctttcttttcacttggtacccaaagatagagtgcttcattaattttgtggttgctatacattgcagtttcttcaaccgtattggtatagaactgtttagatagctcttgacttgtcttttcaccgtcaacattgtacaaaagaatctttttatccaagacaactttggtagaatcggccaattcaagatctgaatgattctctaaagcttgtggcaaattcagatcatcttctgatacccaataattagtgcccttgatccggtagtatgaatagtgatcatgatcaaagtcggtcaattgttgtgggaattgcccagcatagtcgactgtgatcttttgtcccttctttaattcaatattattaggatctgtaccccaacctgttgaattaacatatcttgtgatggttgaagtgttcttattaacggtcacagtaattggggcttgagtgattagacgatagccatcaacgtaaccgatatttgcgaccttgatgtaacgaccagagcctaaatagtagtaatctttgcccttaatcttagtgtaagggatgcgatacttatttttggtagcttcataatagtattttgctttgccactagtgattttccgtttgccaacgtacttgactacgctaccttttttaacaaagccaacttttttgccagacttattgtaaatattggcattaaaaattgccgttaaataagcagggccagatattggcgttacataatctgaagaaatataaacattcttgcgtaaaggatagtataactcaccagcactgtagtcgcctggatcaaccgtcttaaaaaatggttttccataatatttaatcgtgctacctttcttaggtgcagaaatatgatccaaataattgcccgagctattgtacaacataatatgtgaatcaatgacttttaaggagccagttgcattgcttttagtagctgcggcaactgatgtttgaacgtttgaagttagtggtgctgcggcaattggagacacagccaataacgcagtagaaattaagataatttttttattgattttcataatgaaccttcgatctaataaatgcaattaagatttgatcagttagtactcatatcatcattatagcagttatagttatttattccttgatattgagcctatcaagaaagagatcgaaacccagtgtctcaatctctttcgattttattttgttttcttcttacgagtccataatccacttaaactcaagccagacagtaataaccctaaccatgaaagatcactatcttgcctacaggttgctggtaaaacagacttagaggatgatctcggtgtaatttgttctactgtatcgtttttcataatagaagtttccgtttgagcagctgtagttttaacagagtttaatcctactggtgatgcttcactatgcagaccaactcgatgagtggtaggctttctttttttatctttggcatgacgctcaagctctgtggcctttgctagtgccggtaagaatacttcttcatcagttgaagtctcctgacctttttgttcacttggatcatcagaactactaattgaagattcagaagattggttagtttcatcagatgctacttaatcctaaaacagagaagccaattattgcggacacaacacccactgataattttctgaccgaataatgattttgagtttcaattgattttaagtttttcttttgataatttcttctttctagcatatctatattataatttattttgacaatttaacactatattttatatacgcgatcactttcaaataaaataaatttagcacaatgagtgctctttttaaatagtttaatcatatttcttaatagatatgtaattaaagaaacattacatatagattaatactatgagactgtaaaatagtttgtgtaaggatgaatgattccttaaatttatttctttaaacattagaaaaaggagttcctttctcgtatgattggtttgaacaaaaaaacacatacagaaagaagaactccttcatgaatgattttaccaaagattttgctcaagctctattcaatccagacaaaataaatgatttattgcgcaaagagctacaacaggctgttaataacttgttagaagctgaattgactgcctttctgggctatgatccctatgccagaaatggctagaatactggcaactctagaaatggtgcttatttccgcaaagttgatacgcaatttggcccaattgaagtgcaagtgcctcgggatcgcaacggtcaatttcatcagcacacgctgcctggctacaagcagcactcggatatcttggaaagcatgattatcaagctttactccaagggcgtgaccaccagggaaatagccgatctaattgaaaagatgtatggcagccattacagtccagctcaggtatcaaatatttccaagcagatgattccaaaggttgaggcttaccacaaacgcaagctaagcgacaagtttttctgcgtctatttggatgcgacataccttcctttgcgccgagaaacatttgagcgtgaagcagtctatattgccattggcatcaagcctaatgggcacaaggaggtcattgactactgcattgcgcctagcgagaacattgaagtctggacagatatgcttcaaaacatgaaatcccgaggcttaaagcaagttgagctttttctttctgatggtgttgttggcatgaaaacagccttggccaggacttatcctaaagctcattttcaacgctgtttggttcatgtcatgcgcaatatctgcgctaaagtacgcgtcgacgatcgtgaaaagatcatgaacgaattcaaacaggtgcatcaacagacaaacaaagaagaagccacagctgtcctgcatgacttctataccaaatggggcaaggtttacagccatgttatcagaagcttgaaagacatagaaccagatctgctggtcttttataactatcccaagcagatcagagcttcaatttattcgactaacatgattgaatcatttaacaatgtgatcaagcgcaaagctaagcctaaggcagagtttccaactgaacagtcgcttgatgcttttattggcattcaggcaatgagctacaatgaccgttatttcaatcgaattcataaaggctttggtcaggttcaggacaccttagaatcctactttgattaaataaataattaaaaaatcaatttacgagaaagatctatttacacaaaagatttgacagtttcaatactatttttcatgccttcttttcttatcgaaatacttgattataagagcaatatagcttttatcaatcgaattataaaataacagttatttaagtataaaaaataaaaaaagcagatcacccagactaaggtaatctgcttccgttttacagcaactaatctcactaccacttaagcttcagtttatggctactttgctctacctgtaaaaatgaatcaacgtagcgcttaaaaccaggtaaatattttgcaatcaaatgatattctcgtgaattaacaatttctttcttttgggctgcagaataattactttcacctacaaaaaagttccaattcaattgatctacaaattttatgaccacgttagcatcatttttatctggtaaagcttgcgcaatctgatttagttgcttttcatccaaactaaaaaacaaatgcttcaaatattgcgaaaaatctgttggcactttttgcttttcttctgcagttaaccacgattccattttgaaggaatgcacctgatattgcatccccgcttcgtctaaatatagctgaccatattcctgcttagtcatacaaaaacaagctcctgctacctccgcaattggtcgattagcaaacggaccaataatattctgtgcgtgcatatggccagaaaagactgcttttacattatatttttgtaataaaccttgcagtgcaagtgcattatcaagaatatatccctgatagattactttattatggcgatacagattatgatgcataaagaatagcacttgttgctgcttttgctgcgcatcaattaattctttttcaatccagttcatttgagattctgaaattcgaccgttagtaatcggatgagtttgtgattcctgcttgccataaatatttgagtcagccaatattagtcgatactgcttattcagattaacgctataagccagtgaatcagaatcttcatgtaaagcataatgataagaatcagcaaagatctctttccaaatagctgggctaatttgcagggtgtaatcttcatgatcacctttaaacttgcgagcccagccgtcaaaaatatcatgatttcctggtaaaactaagaatgcaattttatttttagttaatggcttaaaaatattagctaaacgttctcctgatattttagcgccattaaaggttacatcaccagtaattatcactgcagtgggcttctcttggattactttacgtacaaacgcggtcaaagcaatttcctgataatctaagtctttacctgcactagtgttgcgcatatgctgaaaagcaagaccatcatcatgtaaactatctgcaattagatgtgtatctgataataaccaaagaattggcttctttttactagtaatcacaatttacctttttcaaaaatctattttcactttaactactcatcattataccaacaaaaaaggcatccctgctagggatgcctcattgcgataaaatattgaattaagcgtcgatttcttcgatcttaatgttaactacgaatgcttcaggagtatcagtgcctgaaacgatcttcttagcgtaatcgtcgccttcatgaatttcagcatgtcctaaaacacgaaatgccttatgagtaggaacatcagcgacaacaatagctgctactgaaccattcttcaagttttcataagcagttgacttagtcttttcaagatattgaatagttgaagcatcaattgccttaagtgaagccttaggaccaacttgtggcacaccgttagcattcacagttgccatgtatggtaagtgtgagttaaaaaattcaatttgttcatcagtaagcttagtagtatctaattttttcataaaattcgacctttcttttcttaacttcattattaattataagctatttgctagaaaatagctattattttgccttagcttaattgattcttacatttatcatacacaagatattgtatttaataaaatgtgttttttaattaaatttctcttgctactaatatttttattaagtaaatagtcgttgatatatcaatgcttataaatgctggcaaaaagtcaaggattgaattttctttttttagccaatagtatattatcttgcattagttaataagtgatacaagatattgtgcttattaaaataaaaatatattttaaatttcatttttattaatgttatttttagtgaggagaattcgatgacaaagaaaggcttaacaaaatatttatcaattggtgcagtaactactgcagcattatttttagcagcttgttcaaatcaaaagagcactacatctgctaaaaatagtaagacagaaattactatgtggcacgcaatgaatggtgcacaacaaaaaactttgaaacaattgactaataaatttgaaaaagaaaatcctaacatcaaagttaagctagaaaatcaaggtaattaccctcagttacaagggaaaattacttctactcaacaaaatcctaataacttaccaacaatgactcaagcttatcctggttggctttatcaagctgcgcaaaataagatgttggtcaatttgactccatacattaataattcaacttatggttggggctcagtagccaaatctaatattcgtcctgaattaatgaagggtgcgcaaattaatggcgttcaatatggtattcccttcaacaaatctattgaagtcttgacttataacaagaccttacttaagaaatatggtttaaaggtacctaaaacaatggcagaacttaagtctgtttctaaagcaatttatgaaaagtccaaccataaaattgttggtgctggttttgataacttagccaactactatgttctaggtctcaagaatgaaggacaaacttttggtcgttcaatcaagttagattcggctgcctctaagaaagttattaacttctacgcagatggcgtacgcaatggctactttagaactgctggtagtgaacgttacctctccggtccttttgctaatgaaaaagtcgcaatgtacatcggtacttcagctggtgaaagctacactaagatgggtgtaggcaacaagtttacgtacggcgttgctcctcgtcccggtgaatacactatttctcaagggactgatctttatgtctttaaccatgcttcaaaagcacaaaaaaatgctgccatgaaatatatgaagtttttgactagcaaatctagccaattaacttgggctaatgagactggctatattcctgttaacgataatgtcttaaatagtaaggaatacttagacagcaagatgaaattgcaaagtgtcttaaaggattcaatgaagcatctctacagtgttcctgtagctaagaattctgactctgcttataatggtatgaatcaaattatggaaaatattttaattgctgcaaataagcatcaaaatgttaatgctcaaattaaggctggtcaacaaaaattagatagcgcttggcgtcaataatgatattaaaaaagcatccccttctctattttgattagggatgcttttttgcatttgcaagagttgaatttaatttaagcactcacatagagtgcgacgtgcaaagcacctacttttgactggggtaaatatttggcttcatcaactattatactatgtcaaaaatatataaagaagagttaacacataaaatacaaaacaaaatcagtgcgaaactccctcatttttatgttcacatagggttcgcactgatttttttcttaactcaaatctttcttagtaactgccaaatgtgccttatcattgataaagacccagattggcaaatctattcctgttgaatcagtcaaattatttacaatttcgctgataaaaagctggaccattttcttaggcggttcagtaaagtctcttctttgcggcgtgtaccataaacctgtgattggctttttagtttgtcgatcgaaaatacaattcagggtttcatcatattgatcaaatgaggccttgtagactatatgtaatggatgatgtgccaagttctcgactaactgataacgcatatcgtccgcaattcttcctttactaatcatcattaaactggtaactggaccagtttctttttcaaatttttgcaacttgccttgtttgagtagcttcttttcaactgaaataaaactatcagaatcaactaacatcgtttttccttctctctactatctattataagcaagctgtcaattactttacataattttgcttattatgcaaaaaaaagccatgacctgaaaatcatgacttctcgcgaattcctcgtccgtaaatcgaaatcttcacgaacatttttaccttaacacaattaattatactagtctaattaattttaattactaaagcttcatatggcttcaatgagatattctctcctagtttgccatcttgtgcagaataattgctcaatacgagttgataattcttattttgatattgttcaggcaatggtactacatgatcagtaccattgaaattagtgaaaactaatatttttttagcttcatccttcaaaaaacgttcataggcaaaaatttgtggatcatcttttaaaaacattctaatatggccatcagaaatcagttgttcgtgcttacgcaacttgatcaatttttgatagtaagcaaaaatttcaccctcgtgtaattctttttcaacattaattctatcttgatctgttggtaaaagccatggctttgattcactaaagccagcaaatttactatcatcccagtgcatcggcacacgagagttatctcgtgctttagtttttactattgcaaatgcttcatcatcgcttattcccttttgtttcaatgccgcaaaagcatttttagcttcaacatctacataatcatgaattgaagaataatgtggatccatcattcctatttcttcgcccatataaatgtaaggagttccgcgcatacaatgtgtcacagtagcaagcatttcggcagatttctctcgatatttaccagtatcaccaaaacggttaagggcccacggctggtcatgattgttccagaacaaagcattccacccgccaccttgatccattttttcttgccattcagtaaataagtgctttaatttcatgaaatcaaacggctctttagaccacttttcaccatttttataatcgacttttaaatgatggaaagtaaagaccatggacaattcatgctcactcggcttagagtactcaatcgaattagcaatagtagttgaagacatttcacccaccgtaattgagtcaggatcttgaccaaaagtagagcgattcatttctttcaaatattgatgcactactgctgtatcagtataaagactcttttcctgacttggatcaccagttgaatcaactaacttttcatccttaccggtcacgttaattacgtcaaaacggaaaccatgtactccctttgaacgccagaagttaattactttgaacaattcttgacgaacttctgggttatgccaatcgagatctgcttgagttggatcatataaatgtaggtaataataatccgtatcaccaaattttgcccaagctggtccaccaaacttactttgccaattattaggcaaggagccgtcaggcttagcttttcttaagtaaaagaatttgcggtacttttcgtctcctgccaaagcttttttaaaccatatattttcggttgaacaatggtttagcaccatatccaacatgacgccaacgcctatttcttttagctttttagttaattcctcaaagtcagacattgtgccaaagcgaggatcaattcggtaataatccgcaatgtcataaccgccatcattctgaggggatacaaaaaagggattaaaccagatcatatcaacgttaagcttcttgatgtaatcgattttagcgatgatccctggaatatcacctactccatcgccattagaatcataaaaagatttgggataaatttggtaaattacttttttgcctaaatctgtcatttttatctcctataacttaattttctgtctacgagcaaagtcaataaatttaaactttttaggattatgaaaggataaagttaactgaaacagcgttgtatctgctaaaaaattatgactagctactagtactgcttccttactatccaattgcaatttctcttgtaaatcagcatcgatttcttctaccgtaattgccttagttgcataggatatatctagccctaatttattttctaaataattgtagattgatttttctgcttcttctgatggaagctcagtaattggtggattaaataagaaatcacagtccagcacttctggttcatcgttaatcattcttaaacgttcaacatagatccctgcatgcttcttttgttcagggaagaatttcttgaaaattgccggcaaatcatcaaccatttcatcattaagtagcttagtttttgcattcattcctaatgatttatttaattccgcaaagctagaaattcctgaaataggaaacgaaaacttttccaaattaaggacaatcgaacctttgcccttgattttttggattaatcctaacgaggtcaattgctgcaaagctttacggactgtttcgcgtgacgcgccataaagctctgtcaattgattttcactaggcaagcgctcgccttccttaaattgttgatgtttaatcttagaagctaagtcttgagcgatcagttcagattttgctttagtcatcttgaccttgtcctttcttaaaatcatgttcattatatttttgatgtacgtacatgtcaatagatatatctaaaaactatattgcaggcatgtaatcattttcataaaaatctattgacaacttgtacgtacaggaatattataataaatgaattttgtgaaaacgcttttataggaaagggagaataacacttatgaataaaaacgaaattgcattacttgctcctgctaatggtcaagtaattgcactaagtaaaaaaagtgatcctatctttagcaaaggaactatgggtgatggttttggtttaacaccaactgataatacagttcttgcaccagttagcggcactatctcaatgattgctgaaacaaagcatgcgatcggaattactactaaagatggtctagaagtattggtccacatgggagttgatacggttggacttaaaggtgaaccgtttgatgtagtaattaaaaatggtcaggaagttaaagctggtgaccaaattgccacgatgaatatagagatgattaaagcaaaagatcttgatactacgattatgactttaatcaccaattcatctatgaaacttgatggcttagatgtaactgaaggtaaagcagaagctggcgatacagttgctcgagcttatttaaaggagtcaaaagaagatagttcagacaagaaactttcgtatgatgaattagctactttcattattaagaatgttggtggtaaagataatataaataacctgattcactgtatcacacgtttgcgcttttatttgaaagatgagtctaaagccaatgatgatattttaaaaaatcaacgtggcatacttgacgttatgcatgctggtggtcaatatcaagtcgtaatcggtaatgaggttaccaatgtttacgatgcagttatgaaacaattgcctggtcttagtgacaatccttcacctcaaactaataatcaggatgatggtaaaaatcctgtttctagagcctttagtaatctaattggttttattaccggctcaatgagtcctgtaatcggtgttattgcagcatcgggtatcatcaaaggcttacttgcactactcacccttccacaacttggtgctttacttagcgtcaagagtccggtctatgtcacagttagtgctatggccgactctgctttcttctttctaccagttctagtaggatttgcagcagctaagcggttaggatccgatccaatgattgctgcagtaattggcggtttcttagtttatccacaaatgattacttggggcaagagtatgacgacaatgtttagtcttggatcttggaacttccaattcttaaactattcctactctatctttccaatgattttagctgcttggctagctaaagaatgtgaacagtggttaaagaaagttttgcctagttacttgcaaatgatctttaccccattaattactatccttgtagtttcaactatcacattagttattaccggtccaatcattcaaggagccgcaaatggtatcgcagtctttattaactggctagtatctgcatctggctgggttggcggcttaataatcggtgccttttatcagttattggttatttttggtcttcactggggcgttgtgccactagttgctcaacaaattgcctcaactggtcaaagctcattaaacgcaattatctgcgcaacaatggtttcccaaggtgcagctgttcttgcagtcgcaatcaaatcaaagaaagcagatatgaaagagctaggaattgcagcagctatttcagccttctgcggtgttactgaacccgctatttatgggattaacttaagatataagaaggtctttgcttcaggttgtattggctcagccttcggtggcctagttactggtttaatgcatggtactatgtatggctttaccggtggtctaattggcttctcaagctttttcaacccggcccatcctactccactaaatagtttctatactttcctaattgccagtgctgtttcaattatagtttcatttattgcagtttgggtatggggatataatgacaacatgactatgggtaaaaaagtagccaagaagcaacgcccaggttcagctaaataaaaatttagagcaaaataaaacgatgaatcacccacaaaggtaaattcatcgttttttgtcttatttaagcagcatcagcaatccgttgtgcctcaattaattcagcttttctgatatcacgaggcaagaactgacgaatatcttcttcattatagcccacctgcatccgatggtcgtctgcaataataggtctctttaataatcctggattctgagtaattaaagcaaccattttagacaatgacaagtcttcattcaacttattctttaattgtttgaaagactgtgaacgagtagataaaatatcctcagttccattttcagttaaagacaacagatgaaggacatcttctttagataattccttaaagacgttcttttccttgaaagaaagatgatatttgttaagccatgctctcgccttacgtgaagatgcactacttgttgacatataaagagtaatcatacaatacgcctctttctaaaaaactcgttaacttctcgtacattagttctattgtataacttactttttgatagtgcaagctatttttacaaaaaaattgttgaaaatagtatacttaccttactgaaagaaggaatttgatgaattttaaaacaccaattgccgaacaaatgaggccgcaaacactggcggatatggtaggccaaagtgagttgctgggaccaggaaaggctttaagaaatattatcaagcagcatgttaatatttctttacttctctgggggcctcctggtaccggaaagacaagcttagctcaaattattgctaaagagaatgattatccctttgcttcctttaatgcttcaattgataataaagcacagttgaacaacattattaatgcttataagtatcagactctcgttcttttaattgatgaaatccaccgtatgaccaaaaatctacaagattttttattaccttatttagaaaatggtcacgttctacttgttggctctaccactgaaaatccaattatgtcgattgtgccagctgtgcggtcacgttgtcaaatctttgagttcaatcctctaacagaagacgatattgcagctgttttgaacaaggcatgtactaaggtccttaaattagtagatcaccaagttgaaaaaaattcgttaaatttgatagcagccgcagctgatggcgacttacgaattgctttaaacattttagagactgttcatgcacttaatcctaaaaagatcaccttagcaaatgttaaatcgtttactaagcagcaattctttagctatgataagaaagccactaaacattacgattatttagctgcatattctgactctatggctggctctgacacagatgctgcactttattatcttgctattttgctaaaaaatggagatttagcttcggttgtacggcgtctgcgtgagattccatatacttatattggcttagctaatccgcaacaagtaactcaaattgttactgcagctaatcaagctgaaaagataggaatgcctaaagctaaatatccactaatgtttgcaacaatgttaatgtgtatttcgccaaaatcaggagcatttgaggaaatttgggaaagacttgatcaagatagtgatcatcccaatcggtatcccatgcctaatagtttgcgtgactttcattataaacacgctaaagaaatcacgggagctggcctagctgagtcaccttttcaagctccgcatcaaatcgccaagcaaaattatatgcccaagggactcaaaggcaaacaatattattttccaaaagacaatcaaaatgaacgcagattatatgagcaatacctaaaattacatcgttatatttacggcgaagattatcaaaaataaaggacagcaatgcaattgagcatccctgtcctttttggttagattataaatgaagaaaattggtttattaattgcttctacgagagaagattctcgtccagccacctatatggtagttctatttaagttatttgttaaatgctaatcgaaaaaactttacgtactttttacgtattttattaccaataataacaaaaaagcagcggcgcaaatacagcgtcactgcaatatgtagcaagattatcaatgaagaaaatggtatttatcacttctaaggaggaaggatatttcatctagccacttatatcctaatgctacagtattaatttgttaaataaaacggctattaaatctaccaatatttttctagtggcttttcattcctaccagtgcgagtttgacgcaaatgttcagtcacaatattagtcaacacttcggctaatttatcaatctgctcaacagtcacatattcgtatcggccatgataattgccaccaccattaaataagttaggtgtaggaattcctttaggcgaaataaagtttccatcagttccacctctaaaggattgtacatttggctttagtccagacttgcgataagcatcaagagccagatttacaatatatggcttgtccttaatatagttgtagatattttcatattgctcacgaatatttacagtaaatctattgccatactttttgttcatctttttaactagatcgcgaataaactgttctttacggttatattcactttgatcaaaatcacgaataatcatgctaatatcggcatgatcaacattgctttgagcatgtagaaccaagaaataaccatcatgattacgtgacttttcaggcacttgatcctgaggtaaattagacaaaaaatcattcatcaaagttgttgcgttaaccatcagaccatatgcttcaccagggtgaactacagtccctttaatatggatcgtaatctctgacgcattaaaggtatcgtattcaaaatctcctggccgcccattgtctaatgtataagcgaattctacattaggaaaatcagctggatcaaaatattgaccaccacagccaatttcttcgtctggaccaaaagcaacaaaaacatcaccgtgttcaatttcaggatgttcagttaaatatttaagcattgctaatgccccagtgattccagccttatcatcaactcctagcaaagtatgaccatcagaagtaattaaggtttgtccttttagatttaataagtctggaaactcagttggatcaagaacaatattatctttctcatctaggataattttctgaccatcataattttcgtgaatttgtggcttaatattaactgcattaaaatctgcagtatccacgtgagccaagaagccaataggcgttaccttttctgctgtgtttgcacttaactttccaattgcaaaagctgttttttcattatagtaagcatcaagcccaagctctttcatttcctttactagttctttggccagctcaacttggccaggtgaggaaggaatctgatcatgatgttcataatatgagcgagtattctttttagctaactgaataaaccgtttttcttcataatctaaattataaaaactcattaatattgcctcttacactaattccatcgtatcacttgaaactggctcagacttggggtctgaccaccacgactctttaactgttttgataattttaaaaccatgctttgcatacagcgctttagctgctatatttgcgctaaagacttctagcctaatcggccgtctaatatttggtaacactgaagctagcaattgatcaccaataccacgtcgttgaaattgaggatcaatataaaaataagctaaattatgtggcttatacgcagcaaagccagcaaattcattattaacttctacaatcctaatctcagaatcaaagaaattataccagtatggtgcttccttaaacggaataaaatatttctccactccgcctattttcatttcttgcaaacgagccgcatcatgaacccggcacaaatcttcgtaatctaaactttgaaaacatctagttcttacttgcataatttactcctttaggtgaaagagttaataaatttttatttttctttaattatacagaagtgaattatacatttaaagattttagttccaattcaaccagtcttcatcaaaaaacttaactttttcttcctgtgattctaattcctcttgttgcatcatagctattatcatctcatctttctatttttagaccattagttcgcataaaaattatatcaaacaaaggttcatctttctactcttttttcaaaaaaatattaattgagttagtaatagatgtgaattacctatatttttatccacaatcgcgataatatcgggcttcagagcaatgtttcacgtttattgtttacatttagctgttttttcaagtaatcaaatagcttttcaccttataaaaattgtttcataaaaaaggatccaacttaatggatcccttaaacatgttattcgtaaataattacaggttcgccctttttaatattgttccaaacgcttcgaatctcgcttggcttaacattaacacaaccatgtgaaccaccttttagataagcggtcttgctccaatcagtccgccaagaggcatcgtgaaaaccacagccacttaaggtaaatggcatccaatacttaactggagaagcataacttgaaccatcatcattggtcccgcgcaatgtacttggtgattccttatagtggatataccacaccccacgcggagtttgatcacccttagaaccttccatagtaccggtaacaacatcacgaagatgaacggctagtttacccttttttatcaaccatacctcttgctttttcaatgatacaacagcataagtatcaccaatttctttatttgaatagccatagccgtgaggataagtgctgtagcctaaaccgtaaagtgcatctgcaccatcaaaatttttttggcctttggcaaatgcttcgagaagtaagcgttgcgtctttttaacataaacgccccaaccccaagtcttattctttaccgttatcgttttgcctttaactttattgccctttggcactgtaaatttatagctcttgtgtaatgttgaaacttctttatcaatttgatttaacttagtcgttaatttactagtatcaccaaattgatagcgattatctcgataagtcacattattcaataaatcttttgcctttaattgatagtttttgccattaattttataagtaatctctgctttgcttaagtcagttagtttctttttagctgtagctaaattactagtagtaaacttataagtctgagtcgatggagttttagtttgttgcttcttaaaaaaggcctttgtctcggactcatctaatgattggactgtagtgttatagctataaaccagtttgttattttttaactcaacttgatttttagctttttggttaactttagccattgccttagtaacggttagctttcctactttaactccatcgattgtaacattagggttaaagtgagttttagcatatttttctgctgcagcttgtgttgccacacggtgattatgaatgccaaaacccgcgattactccaacgataattaaaactgcaatcgttaaaataataatattgtttcgtttattctttttctttaggtcttcgttcatactatcctaccttttatgccagtaataatatctttaatatagcaccttgcaaatttcgtgtaaaatctattgatttatctaaccttttttataattagacgactagcatcccgcaaagcaaaatataaaattggtgtacaaattgcagtagaaattgaattgattacagttgcaggcaaactaacaaaggctccaactaacgctactttaaagctcgtccccaccattaaagcttcaacaattgaaacgcaataagtagtgaatatcttagttacccctgcaataatacctaaaataataatatttcttttactatcttgatagtgcattcctcgataaactgctgtcaaaaccgaagccactactactacctcaagcatagttaaccatgatgttgcggcatagccatttaacaaatcaaaaccacctagaccaataattcccgcaatcataccattacgataacctaaatataaaattgctacagcagttagcgtatttccaaaatgaataaatgggcgtcctaccatagcaggaacggggattcttaacacccagatcccaatataaataattgccgcaaaaagtcccgttaaaactaaagcttgtaaagaattcttgttttctctaaatatctgcattattaattattactccatctcttcagtaaatctggtaaagctgctgcataatttggtcctagacgtgaatcttgcttgggtgtttccctgattgcttgtgcaacaaaatcggccgcaattgaacacgctttttctaaattttctttatgcattaaagcagcaaaaaatgcacttgcaaacaaatctcccgtaccaaaataattacctgggagttttttctgaattaaagaccaactatgatcggctgtaattccaacttccgcaattttttccttattaagtgaaataccggtaattatgacattcgagacaccaaattgactagataattcagccgcaaattctgttgctgttttcaatgaattactagttgcctttttgcctaataaaaatgctgcttctgtcatattcggcgttaaaatcgtagccgacttaactagatttcgcatctttattacatagttttcatcaatgccacgataaagttgaccgtgatcacccattactggatcaatcaagatcaatttatttttttgtttaaaatagctaatcttttctgtccaaaaatctaatgctcttttgcccaaatagcctaagtatacagctgaaaaatcaaaaccaaccttttgccaatgggccataatcttagccatttcattattcaaacttaaaaaagtattctcaccaaagccacccgtatgtgtagacaaaattgcagtaggcaatacggtcgggctcaagccacatgctcctaaaacgggtaaagctgcactaagtgatacttgaccagcacaagataaatcttggctaactaatacgccaccattaaccatcttttttactccaatcaaaaaaaacctgctttaagcttaacatgaagtttaaagcaggaaaaattttattttgcgctaaatgtattagccttgatatgattcaaaatttgataaccaatttgtttatttctgttttcatcattttgagtttgatttaagaacataatcaaaccattttgattatctgtagtcatctgaatccagttaccaaagtgagtattatataagttaccatatgctaacttcaagttatcattattcttcatatataaaccacctgaataaccatttgatgaacgtgatgttaaatgagtcatataatcaaagtctgttcgactcaaaatttgcccattggttaaaccaagttgaatacggtaatagtccattggagctgagaacaaattaccagcacctaccaattgagaagcttgagtctttttaacatattgagcccattggtaattcttttgattccaggtatatgagataccatccgtcatcccggctggaatatcttccaagaaataagttcgctttaagccaagcttattaataattcgttcctgcacattttgcttgtagctttgtccagtttcttgacgtataattccagctaacaaaatatagttggtattattgtatgaaaaattaccaggttgattttgcgtagttgagtttagcttattaacaacccaattaattgcatcagcttctgaataaacacgtcctctatttacttcagtatcagctgctgtcaatccagaagtatgcgtcatcaagttgccgacggtaatattatcagcaccttttaaattaggataccacttagagatcttagtatactgtgtaaacttccctgcagaaattaattgagtgataattgcgccggtaattactttttgcaaagaacaaacaggataaactaccttactgtttcccgcacctaatcgcttgccataataaccgtaaccataagaaatttgttgtggttgtccatcttttactataactacggtaccacgagcataataactagctaatgtatttctaacaaagctccgcatttcagttttgttataacttgctgcctgaactgtcgagctattggcattagcaattgccattccaacaggcattgaagcagctatagttaaccaaatggttgatttgattaatgttttttttaaattaatacgtttcgttttaaattcccccagcaatgttatgtaaattctacccataatattagcatttatttttttcattggggttacaattttgataaagaatcaatgagaacgtatacattttctttttctaatatggataattatttaaatgatcttgatcagtaatctgacgtattactttagccggtacccctagtgccaatgaattatctggaatatctttagtaactaccgatccagctccaataacgcaatttttaccaatttttacgccgggacaaacagtaacattgctggctaaccaacaattatcgccaacagtgatagctgctccatattcaatatcggctatttttccgcctgattgcttgcgagcatttctttgagttggcaacaaaggatgcaatggagtcgcaaatgttacgttaggtccacacattacattatttccaattgttacgggacaagtatccaaaatagtcaaattgaaattagaataaaaattatctcctaagtgtgtaaattggccataatccacttcaattggtccttgtaaatatacattttgaccatgattcggaaaaagacgatcgataattgctttccgttctacctcatcttcatcagtagtcatgttgtaatcacgtgataagcgatgagctaaaccgaaaatctttttcagttcttcagtatctgggcaatatggtttacctgccaacatttttttagtattttcttccatcgataaagcctactttctaatttaatcgcttacttaaataaatcatgtctactagctgatgtccagcttcaaaaatcggatgatcataattttttacaaaaaaatctttgatcttacctgagcgtttaaaaccacatttttcataaaaaggaatagttaaggggctatcacccgttccaacttgcaaaatttgatatttattttgatacttcttagcaataaaattaatccccggatttaaaattgaagtgcaacactaagtgttaaacaaaaaggccatgaagacctaaacttgaagtgacgaaaaatcaagaaaggaagatcttcatgaccaattcaaattctagcatttctaagcactatcatcaattaaccagcgtacaacgtggacaaattcaagcaatgctggattccggcataacttcccgtactgttatcgctcaagaagttggctgccataagtcgacaatcagtcgcgaaatcaaacgcggaagcgtcctgcaaagagacagcagctatttattgtatgagcactattacgctgatactgcacagatttattatgagaagcgtcgcaaaaactgctatcagcgcaatccattgaagcattatgctgtctttttgagaatgctctccagacgctttaaagctaaatttgatgccaccagcatcgatgagttcgttggtgaattccaaaggactatgccaggctacccttgtcccagcacaccaaccgtctatcgctatattgatcagggcttgctggacataagcaatattgatctgcctatgaagctcaaaagacgcaggaacaagcgtcatcacagccatggcggtcacgctttgcacaagaagcatcttggcaattccattgaacagcgtcctaaggaggttgaagacagaaaagctccgctgcactgggaaggagatctggttaaaggcgtcagacgcaagaatcagcctgctttaatgactttgactgaaagaaccacacgctttgaagtagttatcaagattcctgactatcgggcaagcacatgccaaaggctgcttcaaaaggagattgacagacatcctgcctggtttaaatcaatcacgtttgacaatggctctgagtttgcggatatgaccaagatcaagggctgccagatttactttgctcacccatattctccatgggaaaggggcaccaatgagaactgcaatggtcttttgcgtcaattcttccctaagggcaagagcatgaaagacaagtcaaaagcttatgttcaacaggcaactgatgccattaaccacaaatatcgccgaatcctccaatatcacacagcagaggaactcttcaagcaatatatctcttcataacctaactgttgcacttaatttgacaattcaggaataaaattaatcaaatgtttagcataccctttaccttgatcttctggataagtggctatattttttatttctactgtattaccattttcaaccgtaataacacattcagatctaacttttcctttatcaatcaagatatacataattccacgttctaaatagcgatcaatcatactctcttgttcatcagctaacaaaagtaagtctatatactgcttcttattagattttatctctttaatttccatgattattttccaattaatttaaaatttttctctttctactcatattctatgataaactcattattgttataaaaataagtataaacgaggaaaaaatgcgcaaaaaaaatatttattctatttgtatcggattaccgatctttttgattcttgcattctctattatggctcatgcaagttgggttaccggctttgacaatttctttgaaggcttagtccacagtattcctaatctgcagagcattatgcatgtaattacatttttagcagatactaaagttgacttagtttggatgctgttgatagctgtcattctttggctgaaaaagcagcgtcctctttcggcaagtattgtcatttcactagttacagctgatgcttttggttggattgttaaacatataatccaacgggcacgaccaactgctcacttagctgctgatgatggcttcagttttcctagtggccacacattaggaatggcgattattgttttctggctaatactaatattgattccagctttagttaaaaataaaactgctaaaatctggctcactgttttattagctatttggcttgttttagtaatgatttcaagagtttatctctacgctcactggccaagtgatgtttgcggctcagttgctatgggcttaatgtggattggcttagtagatgcaatttgggataaagttactccacaaacagacaaaaataatttttaagattaaaaatagtcgacgataagtcggctatttattttgagcaaaaagaaaaagtcactaaggaaaatgtccttaatggcttttctacaccttcaaatttcttcctatcagcagatgtcataagaaacatcttgcttagccttttcatcctcggagcgctcatcacacgctccgctactatgatatcaaataaaaataaaaagataaagatttttacttgataaatttcaaaaaaagtatatgaattattaaaaatcaaatttgtatattgctatcatttttaaccttttttagctctgatttaactgatttgcttttagtattgttaattgtcttaaaaaaggcggaaatttggccaatttctttttcggtagtcgaacaacagccacctattattctagcaccatgttcataccactcttgacttaactttttaaaatcgaattttgcattaaatggaatccaattgcgctcaaattcgttataaacgccacccaagttaggataaatgacaatttgtttatcagtaaaatcatgaattttatcaatcactgcagttgctaaaaacggtttaaagcaattggctccaatcgcaaatacttgatcatattcattaagcttttgcactacccgctttaaaggagtgccatcactaattttagttgtatcatgcaatgtaaaacttacatacactggaaattccggagcattttcctttaaccaatctaagattgctacaacttcatccaatttaggctgagtttcaagtgcgagacaatcaggtttatttgccaataaaatcttcaatcgtggtaaatgaaaattaagatattcctccgttgttagagaataatctccgcgaaattcatccccttgagctaaatatgcaccataaggtcctactgaagccgctacataattatgaattcccgttgtctttgcaaaatcatcacgggcttttttggcaatttgaactgcattagtaatcaatttagtagcctggtcttgtgtaaaaccatgtttttcaaaagctgggatatttgcttgataagtatcagtaattgccatctgggctccagccttaaaataattcatatgtacttgataaatttgagcaagattatgttctaatgcaattgctgtccaaagttcattatttgtatcaatgcctaacttctcaagagctgtagacattgcaccatctaagattaatcctcgatcacggatctgtttgagcaaattcatttttctcaccttagtataaattgagtagatagttaatttatatttaatattacattaatcttagatctgtttcaaatattatttcttcctatgtcttattttttagctacagtttgctataaatttatttaatgctattttcatataatattaaaatagatttttgaaatcatgtaaataattagccaaatagtgtgccgttaaactttcaggcttttgctttaattctaaaggcttaccctcttggacaatccgaccaccgtttttaccaccacgtgggcctaaatcaatcatgtaatcacaattgacaattaaatttaaatcatgagtgattgtaataatggtagctccctgatctaacaacttttgcattacttggaccagaaccttcacgtcaagaggatgcaagccaatcgtaggttcatcgaaaacaaacaatgtatcattttgtttatgactaagatgagtaacaagtttaaggcgctgagcttctccacctgacaaagttggtgtatcttctcccaaatgtaagtaatccaagcctacttcttttaacaattttagctctcgttcaatcttaggcactttaacaaaaatcggtagagcttcattaacatctagatttaggacatcaacaattgacagatcatgccacttcaccttttgtacatcttgattataacgatcgccatgacaggttggacagacttgttgcatatctggtaaaaattggatgtcaagagtcacaattcctgtaccaccacaagtaggacaagctccttgtttattattatatgaaaaccaacttggcgtataatgcttctttttaacgagtggctgactagcatataactttcgtaaattgtccataattgaagtataagttgctacagttgaccgagtacttttaccaattggagatgcatcaacacttactacatttgaaattgggctagaaaagctactaatttgttttggcaatttttcactttttctttttgctataatagcgggcactaaactatccaaaatcaaactagttttaccggcacctgaaaaaccagttactgcagttaattggtttagtgggattttagtttttacatcatgtaaattaaaatattgctttacttcaaatgaaatagaatcggaatttatttgattggctggctctctggcaagtagcttagcactgccatccaaatatggtcgaattaaagaatgctgatcatgtttgatcgcagtaattgaatcttgatccaaaatctgaccaccttttttacctgaacctggtccaatctcaattacttcatcagcggctttaataatgtcaacattatgatcaacaactactaatgaattgccctgagcaactaattttcgtaaaaccttaattaatcctgcaacattagcaggatggagaccaatagaaggctcatccaagacatataaaactccagtagtttcagtacgtaatgttcttgctaattgaattcgttgcaattcacctgtcgataaggtatttccacttctagccatagtcaaatagtctagccctaagtctaataatggttgcaaattatccaaaaactcctgaataatcgaatgagccattttatgcatattagttggtaaagttgcttgcacatctttaacccaggtaactaaatcacctaactgcatttcggccacctgattaatattttgcttaccgatcagctgttgtaacaattctggtttcaaacgactaccatgacaaagtggacaagtcgaataagtaaagaattcggctattcttttttgcgcacgttctgatttgctactctttgctgaacgatagacagcttgccgagcattttcatataaggcattaaaatcatgaaataccctgccagttcctgataaaaagtccattttatatttcttttcaggaccatttaagacaaaatctttttctttatcagtaagatctttataaggaatgtcgatcctaacaccagcatgttctgcaacgttaggcataaagttccgtcctggcaagctccaagatgcaactgcaccatctttaattgacaaattttcatccgtaatcagtttagattcatctagttgccgtaccttaccagttccgccacactcagtacatgcaccatctgaattaaaagcaaattgttcggcacttggtgcataaaattttacaccacagactggacaagttaattgtcccatttgctcacctgacatactcattgcctttgcaattgccaaactcggcttcaagcggtgtccattaggacaaactggagaacccaaacgagagaaaattaagcgtaaaacattaaaagtctcactcatggttcctactgtagctcgctcatttggtacacttggacgctgccgtaaagctaatgcggagggaatatgtttgacgctagttacatcaacctgatttccctgtttaattcgcctacgcatataagttgacagagcatcaagatagcgtcttgaaccttcttcataaagaatccccattgctagtgatgattttcctgagcccgacagtcctgaaattgctacaaatttattcaaaggaatgtcaacgtcaatattctttaagttatgtactcgtccgccacgaacttcaattttcgttggaatagtcattaaatatccctttccatatttagtcattatctattttaatttataatcatgaattaccaacaagcaaaccaatttttgagactgtaaaatagtttgtgtaaggatgaatgattccttaaatttatttctttaaacattagaaaaaggagttcctttctcgtatgattggtttgaacaaaaaaacacatacagaaagaagaactccttcatgaatgattttaccaaagattttgctcaagctctattcaatccagacaaaataaatgatttattgcgcaaagagctacaacaggctgttaataacttgttagaagctgaattgactgcctttctgggctatgatccctatgccagaaatggctggaatactggcaactctagaaatggtgcttatttccgcaaagttgatacgcaatttggcccaattgaagtgcaagtgcctcgggatcgcaacggtcaatttcatcagcacacgctgcctgactacaagcagcactcggatatcttggaaagcatgattatcaagctttactccaagggcgtgaccaccagggaaatagccgatctaattgaaaagatgtatggcagccattacagtccagctcaggtatcaaatatttccaagcagatgattccaaaggttgaggcttaccacaaacgcaagctaagcgacaagtttttctgcgtctatttggatgcgacataccttcctttgcgccgagaaacgtttgagcgtgaagcagtatatattgccattggcattaaacctaatggacataaggaagtcattgactactgcattgctcctagtgagaacattgaagtctggacagagatgcttcaaaacatggagtccagaggcttgaagcaagttgaactctttctttctgatggtgttgttggcatgaaaacagccttggccaggacttatcctaaagctcattttcaacgctgcctggttcatgtcatgcgcaatatctgtgctaaagtccgggtggatgaccgcgaaaagatcatgaacgaattcaagcagatacatcaacagacaagccaaaaagaagctgcagctgtcttgcacaaattctatgccagatggaataaagcttatagcaatgtcatcaaaggtttgaaggaaattgagcccgatctgctggtcttctacaattatcccaaacaaatcagagcttcaatttattcaaccaatatgattgaatcctttaacaacgtcatcaagcgtaaagctaagcctaaggcagaatttccaactgaacagtcgcttgatgcatttattggcatccaggcaatgagctacaatgaccgctatttcaaccgaattcataaaggctttggtcaggttcaggataccttagaatcctactttgattaaataaataattaaaaaatcaatttgcgagaaagaactatttacacaaaagatttgacaggttccaatttttggaaaattatgacaaaattactattaaaaatatgtgttatatgatatattataatacgcgtggtgctagttaaatcgttctaggcaatatgccatattataagctaaaatggctatttctagccgctgctgaaagccagctaagctccttgctcggttattttcagcgttatagtaactgagcaaagaaaagtcgctttcaattgttcttctaattgccatcagttgatgattattatgttttttagcacctttcatgttttttcgatatggtgtccaaaggacatagcccataccttttaactcggcagctaagtcttttcctaagtagccttcatcgcctaaaagataatggttaattggatgagcattaatcatcaattctactgtttctttggcatcatgcactgatgctttagtgactgcgtagtcaagcaaatagccttcatcgcttactagcgcgtgcaccttgaaaccataataatagactttcttggttgctttatagccaatatcggctatgtcacggaagatcttaacacgataattacgaacaggctgacaaactggaacaggaaaactgtcaataattaaaaattctccagcaacctttacctcttgattccaagcttgacggatgcagcgaattaaaggcaaaagcatcttggctcgacgattaaagcgagaatgagataagccaacaaaaaatttacagaatcttctttgggattcaattccaatttcagtttgccaaatgagcatcgctaagatggagctgtcggaaagctttgtttgatcaatgttttttcgatgcgtaagcttatcaggcgcataaagattatatagtgaacgacaaattacatttaaacgactaaaactaacttgtaaatggtgagagaaacgattaagcttgaggtagttcaattagatcagactcttttctatttaatttacttacaacttgagtctaatccgattggacttttttattaactaaaacgatttaactagcaccacgcgtattataattagataaagtaagcgcttacttttaaaagacatagaaatgaggtgttgttgtgatattgattaaagaaaccgctgttttttcttttgatagatataaaaataccacatatttagagacacccatcaagctaggagtcatgcgtaacggcgcttgattcgtgtcctaaataaaaatgagggttacattttgtaactcttatttttgttcttaaaatacaaaagaaaatcagtacaaaacacggagtttgtactgatttttaatattctaaaggttaattatttaacccaatcgcggacttcactatcatcacgtgcaacaccaacaacattcagaccattagcccattctttaaagtgactgacataagccttatggttagtgcctgctgaggtaaagaatgatgcaacttcaccacggtagtttttcatcttttcaagtaatggcttaattggagttgcaggatagcctgaccaaacagggctaccgactaaaatcaaatcataattattaaaatcgatatcatccatttgaatttcaggataaggaaccttaccttgaatttgatctagagcaatatcgttggtcttgtacatatctgaatcaaaagcgtcaggagcaacagttacttcctttaattcgctgttttcaatttctccgttaatctttttagccatgttcttggtattgccttcccaagaataatagataattaatgtttttttagccataaatttagtccttctttcatttacatttattgtaataaaaaaagaccggtttgaccaatattttaatattattattttagctattttccttttcttttgattatttccatcatagcctgaccatactttttcatcttcgcttgccctacaccacttacctctaaaaattcactttcattttgtggtttaatttgtgccatatcgtgcaaagagcgatctgaaaaaatcataaatgctggtactttttgctgcttagctaattccaaacgcttttgtcttaaagcttcaaataaagtatcactttcttcaccagcatgagtagtagttactgaaatcttagcaattcgccgtttgactacagttttgccatctagtacatcccacccatgattagttacatgcactagtggatatttgctaccttcaacttctagataacctgaagcaattaaatagtcaatcaagcttatagcatctttttgcttcattcttagagagccaaaagacttatattgtgtagcattcatttcttgcatgcgctgattttttgagccaatcaaacattgagcaactatcgtttttccaaagcgaccatctagttcataaaccatactaatcactttttgagcatcaatggtaatgtcagtcaatttatcctgatttagacaatttgagcatttaccacatggcggacaatcttgaccaaaataacggacgataaattgctgcaaacattcaccagtattagcataatcagtaattgtttgcaacttacgatattgcagttctcgatatttatcatccgcatctgattcatcaataaagtagcgatattgacgcaagtcaccaggatgatagattaaaatcgcttcgctttcttccccatcacgacctgcccgacctgcttcttgatagtaactttccatattacgggcacttgaggcatgaatcacaaatctgacattacttttatcgatccccattccaaaagcattagttgctacaattacttgaaattcatcaaattgaaaagcttcttgtacttgacttcgttctgaagaatccattccaccatgataagcaccaacagagattcctttcttagccaaataatctgtcaaactttcaacttttttacgtgtattagtgtaaataatccccgctttatcctgatgtgccttaatatattctgaaatatataatggagtattttgtggtgagttgaccactttaaacgatatattagggcgagcaaaagaggtaacaatcatattctccttgggaatattcaattgttcacaaatatcatcttgaaccgcaggcgtggctgtcgctgttaaagctaatatatttggtctgctttttagtgaattgattccatctaataattgacgataagcaggtcgaaaatcatgtccccattgtgaaatacagtgtgcttcatcgacagcaactagatcaatatctaaaaaatttaactgatatctaaaataatcaatcgctaaacgctcaggtgtaatataaattaacttaattttgccttcatatgcctgacgtaaaattggattaacctcttcttgcggtgtagtagaatttaatgctgccgcattaattccattttgctttaaattatcaatttgatctttcattagagaaattaatggtgaaataaccaaagttacaccgggattaatcaaagctggtatttgataacacattgattttccgccaccggttggcataaccgctaacacattttgcttttttaaaactaaatcaattacttgtttttgacctgggcgaaaatttgtatagccaaatgtatcttttaaaacttcttctggattcataaacttatcctaactagttaaattgctactttttattctaaattaacaattcaccccaaacaagataaaaagattcacacttttaaataaagaaaaatgtgaatcttttagagttaaatttacttataaaaggtttcttctactgcatgagtaatcgcaatcttatcatgagcataggacaaaccgccctgaatataaagcatgtatggttcacgtaaagggccatcagaagaaagctcaattgttgatccttcaacgaaacttcccgaagccataacaacttcatcttcgtaaccatcctgatgatatggaattgggtcaacaaatgaattcattggtgaatagtgttgaatagccgcacaaaattttaccatcggatcaggtttaccaaaagtgacagtttgaacaatatcactacgtggatcactccatttaggtgaaacctgcatccccatttcttctaataaggctgcagtaaagaccatacctttttgagcttcaccagtagtatgagctgccataaagaatccttggtagatatcacgcaaataaccccaagttgcgccttcaccttttccagctcctggcactgtcaaccgtgaaccagcaccatcaattaaatcctgccggccaactaaaaaagcaccgccttttactaaacccgcaccagcatttttataaagagaaccagccattaaatctgcaccatagaaagttggttcttcacattcagaaaattcaccataacagttatcaatgaaaatattgacatcgggacgaacttccttaataaacttgagcattggcttgatcttagccatggtaaaagtcttacgagttgcatagcctaatgatctttgaattgccactactttaattgaaggatccatgatatcttttttagcttgatcataatcaacctcgccgtcttttaattctgtagtcttaaacttgatgccccattccttcatgttgcctggtttattgccagctaagccaataacttcttgaatagtatcatatggtgttccagttaaataataaagggtatcccctgggcgaagcatgctgaaaagaccaactgtaattgcatgagtacctgagccaaattgtggacgaactagagcatcatctgttttaaaataatcggcataaatatcctcaattttatcacgacctatatcgtcataaccatagcctgttgatggaactagatcttcttcaccaacatgatgttttctaaataggtccaatacacgttgttgattatacaaaacctgttcatcaattttttctaaacgaggttgaatcattgattcaactttagtcactttatcgcttaactcttttggtaaattctctttccaagaaaaactcatttttaactccctatttatttttgattacttctgcttgtacgcataaactaccattattattttcgctcagatatactccctgaatctctggcacaaaaccaggaaacttttcaatagcatgcgccaagacttcaaagtacttttgatctaccgttccccacttttcaccgggtgcaacaatgaaaacacctggaggatatggcaaagctccttcggcagcaattcttccaacaacattttctaggttgaccagttcattttgatcttttttaaaaagctgatcagctgtagctggtgtcatttgatagtcttgcatccctgatttagaaaatagcttttgctgtaatacaaaagtattattttcctgatagtactcatgcatttcttgacacaactgtttcagggtatagccttgataacgctttggatactcattatataaaaccggcaaaacatctttcattaagtcatcttctagatagtgtttttcaaaacttaaaaaagcttcaagtaaagtatctagttctgcttgactatctcccggtgtaagtaaaaacaacaatgaattcaaatcatttttagctcgaataatatgattttccattaagtattctgccactaccgcgcctggaatacctactttctcatattttgcatttttaacatcaattccgggagtttttaccgtaatcttcaatgggtcaatcattgcttcgcctggaaccattttacggaaaccgtgccaatccgtattttgtcccatttcccaatattctgcattggtagccaattcatcagtcgaaatttcggcaaaattgtcaggaactaatggcttaaatagcttagactttttgagtagttttttccgccattcaattcccattcgcagagtttgatcccaccactttttatttcctgctccagcagtaacgtaggaattaactgttaatgaagcataaagtgggtatgcataactggaagtaacaaacttcagataagcatgattaaagtgcttatgatcaacatatcgtttttgtcctttaatatgagcatccttttttagaatctgtgacgcttgagccatacctgcttgctgtttatgtaatgactgagtaaccaaaatacctggatcatcaggacccaagttaagtagaagtggtgataaatgtctcataattggtacgaattcttcaaagccgccccaggcacagtcaaacagaacataatcacaaagtttaccgattcggtcaataatccattgtgcatcataaaagactccatcataggtttctgcttgtacgattgctaacctaaatggacgcttagcctttgcctttgccggatctatcttagctacttcagctctaattttatcttcagttaagaaggctggatccatttctccaattagtccaagtgcatttcgatcagttggaatgtagaccggctttgctccgctcattaccaaggcagaattatacaaagatttatgattatttcgatcaaataaaactagatcgccttcagataaaagtgcacttgcgcaaatagaattagctgaagtcgttccgttggtacagaagtaaaccttatctgcatgataagttttagcagctttcttttctgcattaagtggcgttccagcatgcgtcattgtatcccctaattgaggaacagtatcacttgtatcggcaaacattagatttttaccaaagaacttattaaaaactactccggcaggatgtttatcataatattgcccattatggtgacccggtgtagtaaatgaaattggttttgcttgagcaaaattgatcaagtcggtcaaaaagcctggcaccatttgcttttcatattctgtagctttcggagtgacttggtcttcatctacctgatcagttactttaatcaatggaatcggaaaaccagattgttctcttagagcttctgcttgttttattcctaatgcatcatcatttttgacaacaattgcggcaagttcagcactattttgtacatcgccaattggaattgacgaccaacctttcatcttattaacattgacgccatttccaatggcaattttcaaaaaatccatcctttttctttccattttgtccacgaaaccgttttacatattgcaaaactttaaaaagtctttataatttttctacagtatagcgtactttttgcattctttcttaaaatacgctacagctgaaattattatataaatattggaggtttttaacaagtgcatttgccttgctcgcctccgagaacagctatgtcaacacaacaataaaatagcttaacttggaggaatttttatgtcagaaacaatcgaaacagtcaatttcgaacccgaaaaaaaacactacatgtcatggccggttattgcattgatcgacttcgtaacgattatcagttttgaaaatattttttatccatttcaaaatcaaggcttatcagtagttgtatcttggattttcctactcttcgcctacgttattccttatgcattgatgtctagtcaaatgggcctaacctttactgatcaagccggtggattggcatcttgggtacgtcattcatctaacgatacactgggctactggacttcatggatgtattgggttcaaactgttccttatttggtcgatgtttctaattcagttattgtgtccttttcatggattattttgggcaacaatactttagacaagcatatgtctactttttggtttgggattttgacctttgtcattattcttgcctttattttggttgaaaatgcaatcaagaattcacttgaactactatctttaattggtggtggtgcaatgtttattatgtctatgctctttgttttacttgctgtttggtcagttatgcatggacaccatattgctacccaaccatttaacttggccgcatttaagccatcatttagtttacgttacttttctaccactggtcttctaatcttcgccatgtctggtgcagaacttgctgctccttatatcgtacaaatgcgcgatccaaaacacgaatttcctaaagcaatgtggatgttagctttgatgactggattcttgactatcttcggtactttggctttagcaatgtttttcaatgctcatcatattccacatgatttcaagatgaacggaccttactatgcatttcaactactaggcgaaagccttggttggggcaaagtattaatgtacatctttgctgttgttcaagccctctttatgatggcccaattagcagttttacttgatgcatcaagtcgtgtctttgccggtgacgttgccgacaaattcatgccaaaatggttaactgggaaaaaagacaaaacaggtcgtccagttcactcgtacactttaacttgtggtttagccttattcttgcttttacttactgggactttgccaaatattaattcaatttacaattggcttttaaatatcaatggtattatttccccatacaagacttgttgggtattcttcgctttcattatgttacggatgcaccaagagaagttccactcagattatgtcttcattaaaaataagactggtgcccttataatgggctggtggtgcttaatctttacctttatctgtgctactttaggatttattcctcaagaagcagaagcaacattcggtagtgcagcctttaatcaccaattaattatgaatattattacagttatcgtactctttggcttaggcttcttactaccatacttaagaaaacgcgaagaacgtaaagaaatgaatatataaaataaacatgcttcgatcagttcgaaaatcgaggcatgtttattttattattctaagatttcaacctgcatcttactaggaacattaacaaagtcgaattgtttttgaaaaacatgatcaaaccgtaaatcataaacagaaccaataattggtgttaatgcaaaagctcgtaaagtgttcatatctttagttttattagcataaatatgatgcatttgtggtttgattttataaattcgttctaaatattgtggacttacctcatcaacatagccttctagagtgaaaccaatgctagtgagagtttctcttccgcgcaaagcggtaattgaaactttattgtgtcccttaatatggcgataaaatgacttctgattagtcgttgcaaaaataagacgaccatcttcattaaagtcaatatcgataatattggtatgtggatcaccattttgatcaacggtaccaaaaattactgaatggaaacaatcaacgattagatctaggaattcgtcgttacttaaattacgatcgagttcaggaacatgttgtctcatattaatctttccgtttctatatactttctgtaatttttatctatattatttcttatagtgtacatgacacaattaactaaaaacaactttaatgctcattattttcccattttaaatgtataattgtttaatattaatttttctggtaaaattttagctaacaaaaaataagaaaagaggcagaatatgaatatagattataagaaattggtccaagccaaaaaggacgacattcttcgtgatcttgacgaattaatcgcaatcgactcatctgaggatttgaataatacttccgaagagtatcctgttggtccaggtccagttaaggcaatgaagaaattcttatcgtttgcacagcgtgatggtttccatatcaaaaatgttgacaattacgctggccgtgtcgactatggtactggtgaaaaacgtttaggcattattggccacatggacgtggttccagctggtgacggctgggtaactgatccttttaaaatgttaattaaggatggtaaaatcattggtcgaggttctgccgatgataaaggtcctgccctagctgcatattatggcatgcttttacttaaagaagctggatttgaacctaaaaaaaagattgattttattgtgggaaccaatgaggaaactaattgggttggcattgattactacctaaaatatgagccaacccctgatcaagtattctcacctgatgccgaatttccaattatcaacggtgaacaggggatctataccctgaccatgacctttaaagatgacaataaaaagggatcagtagtccttaagtcattcaaggccggcattgccgaaaacgtaactcctcaaaaggcctatgcaactattgttggtagtgatttagccacaatgaaggaaaaatatactaagtttttatcagataataaacttgaaggcgaattcactattgagggcgatgaagctaagattgaattaactggtcaaggtgcccatgcatctgcacctcaagttggtagaaatgcggctacatttttggcagtatttctagatcaatttgattttgctggtcgcgatagaagctggcttcatttcttagccgatgttgaacatgaagactttaacggcaaaaaattaggcgttgctcatcatgatgacttgatgggtgatctctcaagtgctccatcaatgtttgactacgagaaaaatggaaatgctgttttgaaagataatattcgctatcctcaaggtactgatccagataagatggttaagcaagttgaagaaaaatttggtgatatcttaactcaaagttttgcttcatttgaagaacctcattatgtacctggagacgatccattagttcaaaccttgctcaaagtttatgaacgccagactggtaataaaggtcatgaagtcgtgatcggcggtgggacttatgggcgtttatttaagcatggagttgcatatggcgctcaacctgaagatgctccaatggttatgcaccaagcaaatgaatatatgaaggtagatgacctaattaattcaattgcgatttatgccgaagctatctatgaattgaccaaggacgccgaataaaaatttttacatgtatcaaaaaagcttatatactgatcttgttttaatgcagtatataagctatagaaagttgctagtgtcatatatcactagtgacttttttatttttccaataaaacttcttcattatttttcttagattttagccaaaaatgatgtcccaagtaacaaatagctacaaaaggaattgtatagtacaatgctactctttgagttggatcgaaccagattaacacacaagaaagtaggcttgatataaatgcaaaatatggaattacaggataccatgggggcttgtacttcaattcactgagttgatgacctgagtttaaaaatgcccttctaaacttcaattctgaccatgcaatcgccgtccaaacgaatacaacagctaatccagaaatagaaactaatactagataaaccgtcgaggcagcaactttactagaaatcaaagcaaaaattccgcctaacatacttactactaatgacaatactggaataccacgcttattagttttggtgaatgctttaggaattgttccttcgttgcccaacgaccaaagcattctagttgaagcatacaaaactgaattggccgcagaaataattgcagtcaaaactacgaagttcataatatttgcagcaaatggcacatgaattaggtcaagcacatacacaaatgggctttgagttactccagccgtatgataaggaattaatgcagccataactacaattgagccaataaagaagacaattaaacgccaaagtgttgtcctaattgcttcaggaatagctttctgaggattctctgcttcaccagccgtaatgccaataagctcagttcctgaaaaagcaaagtttactgttagcattgttgtaaatactccaccccagccgttggggaaccagccatttttataaaaattaaccaatcccaatgtgcttgataaactttgctcaactgatcaatcaaagctgttgcggtccataatttattattattatctacgccttgtttttccaattcatacgacattgcaccatctaggactaatcccttatttttaatctgttcaagcaaacccatttttttcatgctgtcaatattatttcagtaaatttcctaaataatagccgcaataaactagaaccaagccacccagatatgatgacaccgcgtagaatacaagaccacgataatttttactcttataaagctcaaccaattctgtattcatagtggaaaaggttgtatagccacccattactccagttcccagtaatgcataaataaaagtgttagcaccaattccaaaaatcaagcctaaaattagtgctccagttaagttaataagcaaagtcggtgtaggtaaattagaaaatttattgccaatccattcccaatgctttttaccataattagtaatagcataacgaagcatagctccaattgatgcaccaattcctgcaagcaaaaaattcatcgtgtattcctttcctttcttactaattgaccaacttttttaccaattttcattcctaacatagcaaaaacaaagccaaaaataattgagctaaagtaataaattactgcttcgattggcaaattagcctgcatattttttaaaacatcaagattaaaagttgaaaaagtagtaaatgcacctacaaagccagtacctaatccaactacaagccactgcctaatctctttagtttcaataaaaaagtaggtgaaaaacgctaataaaaagcaacctatgacattaccccaaaaagtaccataatagctgaagtttgcatttaaaccagcacgtgccataccaccaaaaaaggcgaaaatagcgatactaatgtaattaataaattttgaattcaaacagattcctcccacaaaaaaacgtctactctacccctatcggataaagtagacgtcattagattttactcggttaatggcgaacgtcatcgcctattcagttaacagttatcatcatacgacttttctgtttggttggcaagttgtattgtgtgcgtgtcgctttgcgacacgcagtttgattatttaataaaaaatttagtaacaacgtgcttgaaataatgtataattatttttaacgaatgtttgaaaggagcctcaatcttgacttttccatatgaagataaatttcgcatttactgtaaacaacaaaagaaactagccgattcaactatttctctagcctgttcttcaatttcaactttttgggattattattctggtagtttagatgctactgaagcaaatgtagaaaatgttacaactggagatatacgtaactttttagattcacttgaaaataaactccatatgaaaagtaatacagtaaataaatatcttagtcacataaagatgtattttgtttttttgaatgaatatggctacatcattacttatccattgctcactttacgtggtaatcgcttcaatcgtaagcaacactatgttattggctgggaaaatcatttatcagaattaattcaaataaaaaatattcatcctgaaactatcaagatgatggctgctattgcttgtggttttaagccaaaagaaattatgattttgcatgtaaatgaattgttggtaaaagttaaagaaaatgatgtcagagaatatatccaaaattacactaattttgccaataacgataatccctatctgtttgctcgccgcgatggcaaacattacgcttctgattttaatattaaccaaaaaattgcccctgaccgttcaatagtcggcatgccattaactacacataagcttcggatgtcttatgtctactctgttttgtctaattcaaaattaagagaagcggattatattgaaaaattacatctttcaatgaaaactttaaattactatcgtaaaaatatgacactctatgtagaaaccagtaaatttgaattaaaaaaataaacaagcaaaaacgactacccatttcgagtagtcgtctttgtttgttgaaggtgaaatttcaacaaatctatcttagtcagaacttggagttatctattagtaccagccatttgcttgccagaaacttttagcagcgctccaagagccatatctagatttgacataattatccgctacacgttcttggttagcagctgaataatcaccattcaaataagatgaagaaagttgatacttacctacatattggccatttctagcactgtatgagccaccagattctttgcttgcaatccatgcctttgcactagcttcggaacctgtcgcggttgatgaatatgaactagttgttgtcgtcttaggtgtgtagttcacatttgaataagtgtatgaactttgactttggctagcttgtgtagtttgttgagctggcgtttgtgtttgagtgtaggtattttcttgtctagcttgagtattttggctagtagtataattagttgccaatacccattgatttaagccaagatcataccacttctgtccctttgaatcataagcagtttttataatcttccagttagtacctgcagctagagtttgaccagttgcaactggattttcatagttattgtaaacggtagtagcttgtgtagttgtatacactgctgcatcattttgcacaacggcagcttgtgcttcattattatctagttgattgattgcaccaatacctgcaagtgataaagcagcaacagcaatagtcttagttaaaatagatttagttttcaaaaaacatctctccttaaattaaaacgtcaattactattcatcatttttgttttattattctcttgcaattgacattttatataatacctgcttcgagttgcagttccatcacagtcagatcacacaatgattaaagaaaaatgttttttcgtaacagttggaaatatttttaataaatctagatttctctgcaatatttgtaaaaatcatgcaatatatgaacaaaatttgacgacaaaataagcatccctacgccataaaagatcgttttagggatgcttatttaattaataatctaattcttgatccatacttgcaggccagccaccaataccacgtttttgatcaaggccacgcaatgtctccatctcttcagcagtaaattcaaaatcaaaaatatccaaattatccttcatgtgtaacggattcgtcgagccaggaatagtcatgatattttcttgtaccaagaagtgtaacgcaatttgtggcactgtcttattatacttctcagccaaagaaagtaaggttgggtcattaaataaagccttcattccttcaccgagtggtgaccaagattcatgtacaatattattttcaattaaatatttatgcattttcttttgttgcttaaagacagacgtttcaatttgatcaactactggcttagtatcgaaattattcataatttcatttacttgatcatggttgaagttactcagtccaattgaacgtagctttcccacctgatatgcctcctcaagtgcctggtaagtacctaaactatcagacataggccagtgaataatcattaaatcaaaatagtcttgctgggcgtgaattaacgattcatcaatcccattcttcgtctctctataaccacttgtttgcgctttagtggtcaaaaaaatgtcttcacgtttaatgccgcttttgttaatagcattgcctacttctgcttcattactgtatgcttgagcagtatcaattaaccgatatccagccttcaaagcctcgacaaccgctccttcagtaattctaggctgaattctatatgttccaaagccgaagattggagtttttacaccgttattaaaagttaaatatttcatttttattcctcaatattttattcaggatcagatgcagagtgataagtaatactaaatccagcttgatattccttacctggctccaaatgattcataccatatttgtgctctagctcaccatcagcatcttctctatctgcaattccccaccatggctcaatgcatacataattagcggtatttggatattgtgaccaaatgccaacatatggtgcatttctagtccaaacattgatgtggaacttactcttatcagttctcaaagatactttattgtcatgaccatgtaattcataaatcaaggcatcatctttaaatagctcatcacttaaaccaataaaactatcagtcgaagctagagaacgattattccagtcaagatatgctcctttaagtgggatttttaccctagcaatagatggatgcatatcgaaataataatcttctttctcttccccattatttactggtaagttaaatccagggtgaccacctacaccaaaaatcatagtttcatctgatttattaactacgctaaagttttcttccaataaattattcatcaaattatagttaactctgaattcaaatttaaatggatacatttcacgcgttttttcattatctttcagtaagaacgtgatactttcttgtgtatgattctccacttcaaaatcacaatcacgggcaaaaccatgctgacccatatgataggtcttaccttgatacttatattcatcattcttaagtcgccctacaattggaaaaagtacaggtgcatgtctgccccagatctctggatcagcttgccacatatattcttcaccggtatgagctcctttaacgctctgaacttcagctccgtgatccgaaatcactacttcgatcatattattcttgattgtgtaatccataactaaatttccctctacatatcaaacagttaaaaatcataatgtaatcgcttaattacttatattttaacattaatgcgtcaataagccagaataaaaacaaaagaaaaaagcattcaaactttgaattgaatgcttcattcgtgattctttgatcaattagagaataaatttagttaagtctttattcataataatatcgcctaacttatcttcaacataggcttcagtaactgtgatttcacccatttccatatcaggcccttcgtaaagaacgtcttctaagagcttttcaagaatagttgaaagtcgacgagcaccaatattatcagtgccttggttaacatcaaaggcaatctccgcaattttatcaacggcttcttgggtgaaaactaacttaatgccatctgccttcattaaagcaatgtattgcttaagcaatgaattttgtggatccttcaagatcttgacaaaatcgtccttggttaaagcgttaagttcaacccgaattggaaaacgtccttgaagttctggaatcaaatcactaggcttactttcagcaaaggcacctgcagcaataaacaaaatatgatcagttgaaactgggccatattttgtatttacagttgagccttcaacgattggtaaaatatctctttgaacaccttcacgagaaacttcaccagaattacgtttattaccagcaataattttatcaatttcatcaataaagataattccgttattctggcttctttcaatagcatgttgatagatagcgtcatagtcaactaacttacgtgattcttcttgaatcaaaacttcacgtgcttcttttactgataaagtacgcttaacctttttcttaggcataagatcactaagcattgagcccatatccatccccatttgacccatcatgtcactcattgggttggccttaggagcttgttctacctctatggtaacttcgtgatcttcaagtaagcctttagctagcttttcagccacatccattcgtttgtttcttacatcagcagaaacatcctcttcatgatcttcttcgcgattattttctcccatcaacatagacatcatatcttgcatttgctgcatttgattttcacgacgttcatgtttctctgctggagctaacaaacgaactaattctttatttgcttctttagttgcttgagtctttacacgagcaaattggtccttttcttccattcgtacggcttcggaaaccaagtcacggaccattgattcaacgtcacgtcctacataacctacttcagtaaacttcgttgcctctactttaacaaagggagcttctacaatatcagctaaacgacgagcaatttcagttttacctacaccagtaggaccagccattaataaattcttaggcgttacttcacgttgcatttctttagataactgcattctacggtaacggttgtaaagagctatcgcaactgattttttagcttcatcttggccaataatatattcgtttaaaattttaactatttcttttggggtcttaatagccatttccttcactcctaaatttcatcagtgacaattttatcatcagtgaaaacatcaattcctgaagcaatctttacagcttcatgtgcaatttcatcggccttcatatcttttgcgtgtcgagtcatggcaatcgctgcggcttgagcaaaattaccacctgaaccaattgcaactacgttttcatcaggttcaagtacttcaccattacctgaaattaaaagtaggtctttgtcatcaaaagcaatcaacattgcatttaatttttgtagagttggatccttacgccatgcttgagccatttccacggcagcacgacgaagatcgcctgagtagctttcgagcttgccctcaagcatatcttgaaggctgactgcatcagctacaccaccggcaaaaccaattactacacgatcatggtaaatacgacgaatcttacgcgctgttgccttggcaataactttttcgcctaaggttacttgtccatcaccggcaattgctgtttttccattaaatcttactgaacaaattgttgtcatgttaaacctcaactttctttattacgaggaaaatatttttgataatctgattttaaatgagccattgttacatgagtatagatttgcgttgctgatagactactgtgtcctaataactcttggacacttcgcaaatctgctccattattaagcatcgcggtagcaaagctatgtcgcaactcatgtgggtgtactttaccactaattcctgcctgattaaaagttttttgcattacagtttcaattccgcggctagtaatgccagttccttgattatttaaaaatacatgctgttcatcatcatttttaagtaataatggacgtgcattttctaaataagcaatcaaagatttttttgttttatcatcaaaagcaacatagcggtctttatttcctttaccgtgaaccaaaattgtctgtaagtctaaatcaagttgattcaaagtaagattactaacctcacttacccgcatccctgtcgcataaaacagttcaaacattgccaaatttctcatcgtcaaaggcttatttcctttcaatgaatcaaaaacctgctttaattcaggctggtaaaaaaattgcggtaattttttctcaccacggcgtaaagtaatacccttagttggatcgattgccactagtttgcggcgggttaaaaagcggtaaaaagaatgcaggctggacatcttgcgcaactgactactacgggctaacttgcgttctgctaaatgttgtagataaacctggatatcacgttctcttactttagtccaacctgggaatccaccattttcatgccaaaacctttccgcttcatgcaaatctgtttgataagctaaaacggttttcgcactataatgacgctcattttgtaaatatgataaaaattgatctaactcactttgcctttggttcattaatctaaaacttccgtcttaaattcatctaaactagcaagaccacgttcactgaccttctcatggcgctcacgcttcttgcgaatcttcttaccctctagtggaggtagcaaagcaaaactagcattcattggttggaaatgtttagcactcgtagtagttatgtagttagccattgagcctaacgcagtatcttttgggaaagccacagtatctttccccatagcttcacgtgctgcattaattcctgctactaagccactacctgcactttctacatagccttcaacacctgtcatctggcctgcaaaaaataatccaggctgctcttttgcctcgtaagaagctgtcaaaacttctggtgaagccatataagtattacgatgcattttaccataacgaacgaaacgtgcattttctaagcctgggatcattgaaaatactcgtttttgttcaccaaatttcaaatgagtttggaaaccaacaatattatacattgaagctgcagcattatcttggcgcaactgtacaactgcataaggagttttgcctgtatgtggatcttctaatcctactggtttaagtggaccaaaaagcattgttttagccccacgcgctgccattacttcaattggcatacacccctcaaaaacatcgctattttcaaaaccatgtaattgcgcagtttcagcgttaattaattcctgactaaacttttcatattgctctttagtcataggacaattcaaatatgcagcttcaccacgatcataacgcgactttttataaacaattttcatatcaatcgagtcagcggccacaatcggagctgctgcatcaaagaaatgtaaactatcagttccagaaaatttttgaatctgtccagctaaagcatcactagttaacggaccagttgcaataattgtaatcccatctttcggaatttcagtaacttcttcttcgtgaacagttacattctctaacccacgcaaagtgtcagttacgtatttactgaaactatcacgatcaacggctaatgctccacctgcaggcacttgagttttgtcggcagctttcatgatcaatgaatctaaatgacgcatttcttcttttaaaagacctacagcattagataattgatttgatctcattgaattggtacaaaccagttccgcaaattcaccagtttcatgagctggagtctccttttttggtcgcatttcataaaggtcaacatgaataccacgcttagctaattgccaagttgcttcactaccagcaagacctgcaccaataactgttacattttttggcatttactcacctatattttctatgttaattgtttttttcgttttcactgtcttcacgataatcaccgttaggacaaagaatcactggaccttttttagaatgcttttctactaaaaagtggccatcatttggacaatttctgccaattggcttgtcccatgagacaaagtcgcattctggataacgagaacagccgtagaatttacgatttctacgtgatttcttttcgacaacctgacctttgccacattttggacaaactacaccgatttctttaatgattggcttagtattacgacaatctgggaaacgagaacaagcatagaacttgccatagcgtcccatcttaatcaccattggtgcaccacaaatatcacaattaaagccagctggttcatccttgatttgtaccttttcgatttcactatcagccttatttaattctttcttaaacggttgatagtattcgtcaacaacatgaacccaatcctttttaccatcttcgacttcatccaattcattttcaagtcgggcggtgtaatcaacatcagtaatatctgggaagaagctttcaattaagccatcaacaatttcacctaattcagttggtacaattgaacgaccatcaagtttaacataatagcggcgttgaattgtatctattgtaggtgcataagttgaaggacggcccacgccattttcttccaatgcgtgaactaatgatgcttcagtatagcgtgctggtggtaacgtaaagtgctgtttgttatcggacttagtcatcttgaccttgtcaccctcttcaagatcaggtaagtcaacattcttttcttgttgattatcataaaccttggtgaaaccagcaaatttcaatttagaaccagtagttctaaaaatcacaccattttgaacaatatctgcacgaacagtatcataaacagctggggtcatttcactggccaaaaaacgtgaccaaatcaatttgtataaacgatattgttccgtagttaggacactctttaatgactccggtgtgcgatatacagatgttgggcgaatggcctcgtgagcatcttgtgcgtcttcttgattcttaaaatggcgttgactcttagctgcaaattctgcaccataattttcatgcaaaaacttagaagcctcttgttgggcaactggtgatgttctcttagagtcagttctcatataagtaatcaaaccaactgttccttgcttacctaaagaaatcccttcatataattgctgagcaatactcatagttctacgagtacgataacctaaacgcttattggcttcttgctgcattgtagaagttgtaaatggggctgctggctgacgccgacgttgccgagcaacaactttatctactacaaagtcctttttcttatcgattttagccaaaacatccttaacagaatcgatattaggcaattctttctttttgccatcaacaccataaaaggcagatttaaaagtttctttacccttagcaaattccgcatcaattgaccaatattcttttggcttaaagttcttgatctccttttcacgatcaatcactaattttaaggcaactgattgtacacgtcctgcagataaaccttttttaactttggcccaaagaattggtgaaagtgaataccctacaattcgatcaagtacacgtcttgcctgttgggcatcaaccgtatccatatcaattgtccgggatgcttgaagctttctttaactgcatccttggtaacttcgttaaaagttactctattcttggctttttcgtcaagattcaatgcgtgcgctacgtgccaagcaattgcttcgccttcacgatcggggtcggatgctaaataaacatccttagccttcttggcttcgctttttaattctttaatggtatcgcctttaccacgaatggaaatatacttaggcttatagtcgtcttcaaagtcgattcccatttgtgacttaggcaaatcacgaatatgccccttggaagcaataacgtgatagtttcttcctaaatatttttcaatagtcttagcttttgcaggtgattccacaatgactaaggtctttttacgtttttttgttgttttacttttcgctttagtaggcattaactgcctccttaattcttattttattttatgggtacagtccaaaaataactaatactttctgaattgtcaaatctttatcttgttaaatttaaaatcaacaattggcgtagctcctgcttcaattaattgattgggacctgcagacaatgcattagtaattggtccaggtactgcataaatatcgcgattttcttgtaacgctaaattagcagtaatcagtgaacccgacttttctttagcctcagtaacgattatgctttgacttaagccggccaagatacggttgcgttcaggaaaacgatacggacgcggtggtgtatcaggcaaatattcactaatcaatagtcccttttgcacaatctcttcttgtaaagcaaaattttgcattggatatgaaaaatttaaaccattgccaataaccgcaattgtttttccttggttgaaaagtgcagccttatgagctaaggcatcaacgccttttgctaagccacttgctacaacctgaccagattgcacaatattaggtaccaagcgattaataacatcttgactatacttagtcggatagcgtgagccaacaattgtaatgatttctttttgcagtaaagaaatatctcctcgggtaaacaataccataggtggtcgataaatttgacgtagtttttctggatatgcttcatcgaaaaaactgattacgtcacactgctgttcaatttgttgtaccattcgatccaactgatcatcctgaaaagcgcgatagcatgcatccattagttcctcagttaattcaatttgttctaattcttcaaattcaatttctgtttcatcagttacctgattagcaattgtcagcaatttaacataaccaatccctttttgcaattttaattttagtagaaattctgtttttttcataaaaaaagccctccactatttattacgcaaaaagagaccattatttttttataaattgaaatttattcaaaaaaatcactgactggagcaaatgttttgcggtgaattggcgtagggccatactttttcaaggcttcaatgtgctccatggtgccgtatcctgcattatgatgaaagcaatattgagggtatattctatcataatcatccatcaattgatctcgaaagaccttggccacaattgaagctgccgcaattgaattcgacttagcatctcccttaatcaatttaacttggggtagatttactggcacattcattgcatctaccaaaagtgcattcggcttaacatcaagtgctcgtactgcttgagccatcgcttgacggtcagcttcataaatattaatttgatcgattacctctgcactttttactccaataccaacactaactgcttccgctaaaattttaggatataacttcaatcgtttctctgggctcaatttcttcgagtcgtttacatctaataaatcaaaatcttgatcaattatcacagcagcagttactaccggtccagctaaagggccacgtcctacctcatcaacacccgctactaattgtcccttttcccagaactttttttcataagaaaagcgacgcaaaaactcttctttttttgctagtaattttgcttgacgcttacgataactaactaacaatttttgtacgccggcccgcggatctgcctcaagttcgttaatttgggcttcagagacctcagatttcaacagctcttttatttctttaattgtcatggtctatctaacgtaatccttccgattgcacccttacgcaatttttgtaacataaataatgaaaaacgatcataatcatcacgcatgccatatttttcagtcattgacaaaagcaaatctggatcagccatatcagcaatttgctgttcaggtaatttagaaaatttaagcaaatccttagcataaaattcacgtaaatttttcaaaacaaataatgctacatcatctgcatgaaaaacactatccttaattgcaccgaaagcagctaatttataaccaacttcctgatcagaaaatttaggccataaaatccctggtgtatcgagcacttgaatattagcatttgttttcagccatctttgtcccttagttacacctggtttgttaccgacttcagccacgttccgaccaactaaacgattaatcaccgttgacttgccacagttaggaatacctgccaaagcaattctaatagtaggatttgaggcccctcgtgcttctagcttctctgttttggcagctgccgccttttttactaaggaaaccaacttctgcatattagtattgtgcaaggagtcaagtgccaaaacatacttattatctccagctaattctgctgcccatgcctttgttaaaactggatcagctaaatcagccttatttaagataataatatgtggtttattaccaactagtccttcaatcattggatttcttgaagcttgcggaattcgggcatcaagtacttccaccaaaacatcaatcagtcctaacttatcttccagttgattacgagccttgttcatatgccccggataccattgaattgttgccatattatctcttctttctaaaattaatcattttcatcatctaagaacaccacttctgacatcaaaatctgtctatataaagccagaaagcctcgacgatattttctctcttgttgtgcaattttacctaaatagtcacgttcttgtctaaaagcatatctatatacctcagctctaaattctttctgatcatcgggtaattctttttgtttaattgtatactttatttccctagcaaaatcaaccatagaagtttgattcatttgtgcccttaaatcgaattttaattgttttcgaatctttttaggtaaatagatctttttcatttgatccatagcatactcaatcattgccacacgaactcgatcaacttcctttctttgatcaaaatcaggtatatctttgtccaagatcatgtgaaaaacaattgttggaacaatcatacttagtaaaataagcgtaatttcactcaccaaaattaaatggaaatctgctacattaatacgtaaatcatataacgtatatgctaaagcaaaagtaactgctccatgaatgccacccagactaaaaatcaatgcttctttattactcgtttttcctttaatagaagggctaaatcgataataaaagtatctaataagcaaattagctaggtataaaattattccgatcaaaatcgcatcaattgtttgttgattaaaatgtcttccctcattgaccgaacaatgatgattcccaaaagcaaaaagacaatcccatttaaaatatcaatcagaagttgcgataattgattactgttataaaaaataaaggcattagtaagcctgcttcgctcagattcaacgttatgaatcaatccggctgcaacgactgcaataattccagaaacgtgaatttcttctgctaaaaaatatattattaacggtgtcaaaaagaatatgacatcaaccggcattgcaacaccagcagataaatgatatttggagcgaaaactttcctgacgcaagaaaactaataaagtagccaccaaagctcctagaaaaaacctccacctgcagaatataaaaaattacctattgcttgtccaatccgtaattcttgatgcaagtaccaatcaactgccatattaagcaaaatgatacctgaagcgtcattaaacaaagactcatcttttaggtaaaaagcaatcttcttaggcagcttcaatccatgtgttacagattctgttgctgtagcatctgttggcgttgaaattgcagccagaataaaagccagtggtagagagacccatactaaaatagatcccgaatcccgcagttatagttgccaagataatcataataaccgttaacccaactattgcgccccacgaacgtaaaacattatacaacctagtacgttgtccctcaaaaaatagtaatggcgctacaatcaagcccataaataattccgagctaaagtcctcaattaatgaattagtttgtggtactagtgcaatagccgctccaatcgccattgcaatgtaattaactgatattctcttcaaaaagcgttgttgaataatcgtcgcaaatgctaccgcaaagacaataaaaccaataaaaattactacctgcatttttctacccacttaataaaaaagcccaggcatctatcaggcttgggcttaatacatcattttgtcttcatacattcgataagcacgatcaaaaattgacatacttggtaaataactagcattcaattccaaataatctgacaatttctcataatcttgttcttgcttaggaaaagtcaggtcatgctgtgcattattcgcaaattgagctacgtcatcagctgaatctgcatccctttgcgtcattaaatatcgataaaaactttctcggtaagccataattactccacataatataagatcgcataagcaccattgccagcatgtgttgcgataattggacttgtctctgccactaaaacattaatcgcaggattgattgcacgaattttttcagctaattcttccattaattcaggtgtatcaacgtacgaaatgcctacttctttaatatgctctttattatctgcgatttcttttaacactcgttcatcaaaagcacgtgtaaatttcttacctcgtccttttttggctacgattaacttaccttgtggcatctgaagagcgattctaatattaagcatagtagcaattcgaccagaaagtgcacctaaacggccacccttgattaagttttgtaaattaactaccatcatttccagtttttgagtactacgaatctttttaacatgatcaataatctcagccatgcttttaccagcctgagcatccttagcagcagccaaaacttggaagccttctgccctgtcggttagttcagagtcaataattgtaacattatcgctttgacctgcaatttctgcagcttgacgagcggcatctatcgtaccacttaatgatttagctaagaaaataccaatcacttgactgccatctgcggttaattttttaatcacatcaacaaaacggccaattggtggctgactagtcttaggtaagctctccgcttcattcatcttcttgacaaaatcacttctagtgatatcaatcccatccacatatgacttaccgtcgatggtaatcgtcaatgggactactgtaatgtcatatttttcaacttcttctggtgttaattggacggaagagtccgtcataacttttatcttcgacaacgtattcgccttcaattctaatttgtttacccgatttatgataaaatgtaagcaacatatatactgtattgtatcaaaaaactattagaagaaaaaaggattgattacacttcatgaaaattagcaaactttggcagcaaccagaacaacgatcagaaaggtactaccttctagataatatttttagtgccataactcatgggattggtttcggactagcagttaccggcttagtaattttaattgtaaaggcagctcatacaggcagcccgatgcgagttgttactttcacaatttatggctcttgcctggtactgctttatttattttccacactatatcacagtttagtttttacacgggccaaaaatatttttcaaatttttgaccattcctcaatctttcttttgattgcaggatcttatactccatattcacttgttgcaattggtggagcctggggttggactttatttggcttgatctggggcctaaccatctttggcatcatttactacatcttcaatcgtggtaaacacgtcatacttgatacaatcctctatgttgcaatgggatggttagttatcttgtcaggatcttatttatatgttcgcttaagtccaactggattctggctattagttagtggtggcattgcttacacaatcggcgcgattctgttcagtatgcgcaatgttccctttatccatactatctggcatttatttgttatgctcggttcaatcttaatgtacttttccgttttactttatgtttaaaaaatgtagcagttgaattctgctacatttttctttctattcaattgtagtcaaatagctttcaatcgcttcttgattattctcaacttcacctgaaacaactaactctcgaattttattcaaagtctgccccaattttgcacctggtcgcatcccgcgatctattaaaaatctcccatcaacggctagttccgacgcttttttaataggtaaagccatataacgatcaactaaagcttctgaagaaattggttgaccaacaatatgagcaacgtcaatcgtattaattaatgtctcttcccctgctaagaataattcataatcactaggagcatgactagaaagtaaatcaaatagattaataattctttcgacttgctcagtcatagcattagagtttttccagtcacgcataaaacgatgaatttgttcattcggtaatttcaatagcaaaattatcagtgaccacaaactattttccatcgttggactgaattttaactgtgggaaaatagctagttgatctttttttccgccaaaatcaggtacatcttcactcaaatttgtatcaagaaaaacctgaaaagcttgccgagcatgtggtcctaaacctaattttacaaattcttctcgaattcgttcaactgaaatttttttaagtaatttatgattatccttaattgcctgttgggtcttgctttctaacttaaattcaagttgactcataaaacgtacggcccgcatcattcgcaaagcatcctcgtgaaatcttttttctggatcacctacagcacgaatgacatggtttttgagatcatctagtccgttaaataagtcaacaatttgccctcgtgtatccattgccagagcgttaatcgtaaagtctctacgctttaaatcttcatctaagttttgaacaaatgttacatgatctggacgacgaaaatcttgataacccgattctgttctaaaagtggtaatctcataactttcaccaccataaaggacagtcaccgttccatgtttaattcctgtatcaattgacttatcaaataactcttttacctcttctggataagcactagtagtaatgtctacatcatgaacatgacgatgtaacaaaacatcgcggacagaaccacccacaaagtacgcttcaaagcctgcattttctaatatctgtaacacgggcattgccttggtaaaaatttctggtaaattatctatctttatcatattaaaatctcaattcttattgtctttattattacttttgctatacactttgttaaaattgaggaaagacataaaggaggtaatcattatgcgtaagattgacaaaagtatcttaattgatatcctcatgatcgcgctaggctgtgctatttacgctttaagtctagacatgatttctgtccccaataaactagccgacggcggactaagtggtatttcacttcttctgcggcatttttggggcatcaacatgggactatcgacccttgtattgaatattccactaattttgttaggctatcgctttatgggcaaacgtcttttagcctatacaatctggggaacgctcagtctttcctttttcttatggttttggcattcagtacctattataaaacaattagatttagaacacgacctcttcctttcagcaatttctgctgggttattgtctggaatcggattagggttagtatttagatataatggtacttccggtggaactgatattattgcccgaatctgtcagataaaatttggtatttcgtctggcaaaatgcttttagcttgtgatgcaatagtactcttcgcatccctatcttacctagacatcaagcatatgctatacacattattagcttcttttgtcttatcccgagtaatggataccgttcagcaaggtgcatacacagcccgtggtttattaattatctctgacaaatatgaacaaattggcaagatgattgatttaaaactaaatcgtggtttcacatatctaaaagctttaggtggctatcaacaaaatgaaaaacgtgtaatttatgttgtagtcgcaccgcgggaaattccatcaatcaaagctttaatcaagcaagaagatccacatgcttttgtttcaataattgagataaatgaggcaatgggagaaggatttacttataaaaaaccacatcgctttttcatccacaagtaaaaagctataccatgatgcatttcatgatatagcttttcttttactaataattaataattacagtcaatacgttattagctttaacgtattcgttttctccaatttgaatgaatggccgttcatcaatttctttatggccaagatttttaactttagagccttgtttaacaaacttacctggaattggctgaccatttttatcataaacatatgatggatgcttaatgcggttaattgtctcggctgtgtccttaatgtatggtaaaaatgccccttccttaacgaatttattcttaccaatcttcacaaaattattgccattaattgatttaatgcctaggatcttgtaaacacggcccttttttaaatgtccaactttttctcctttacggttaaaaatcgttgcttttctagtcaagtttaactttttaccctgacgaattggattagttgtagctgcgttaactgtctgagcagtcatcgcacctaaacttaaggaggctaagactactcctgccatatacataatttttttgttcatcatgatctcatcccctaatcattacttaatcttcttacctatattttaacaaaaaatgcagaggttatacacttttctctatttttatttatgggatggataacacttattctttgcaatctttcatggcaagaactaatcttagcttgtaagcgtttgtcaatatcaagcaatcaagaggatgaaaacaatgccaaaaaacagttactcccaagaagctttcgttcatgtctatttacttcttgggaattaatggggtaattgggtccggtgcctttttaatacctcaaacaatctataaagatatgaacttgatgagtgttttcataacaatttgtgctgctcttacagtaagtatggttactctttgttatgctgacttgtcaagtcgttttactggatcaggcgcagcttggctttattcatatcacgcctttgggcgatttactggctacgaacttggaatatatacttggtttttaggatgctgtacatatgcggcagaaatagtagctttgttaactattttaaagactttgtcccctgtttttagtaatcacgctgttcactacgggatagctattggaataattgtgctaattgtgctgtttacgattattaacttatttggtcggacaattgtaaaattagtcgataacttatcctctgctgccaaaatgattactattctgatttttatcatcattggtgccttttttattcataaaatgaactttacacctgtgattcctaaagcagcaaccctaggtgttggtccttacttcaaacattttggtgctgcatttagtgtagtattttacatgtttactggattctcctttattccgattgccccaaaacagatgaataatccagagaaaaatattcccaaagtattgatctcagtgatgatcactgtgactattttatatgcattaatgatgttagtagctatcgggattttaggatccaagatggttaattacagtacgcctattgctgtagcctttcaaaaggccgttggtgattggggctacgttctagtgattgcagggatgctgattagtgttatcggcgttgcttttgcaggatctttcaatactccatcgttgattgcttctcttgactccatcgttgattgcttctcttgctaatgagcacgcaatgttacctaaatggattggaaaaaagaacaagcatgatgctgcttgggtagctattttactcagtgcaatcatcactatgattttaatcacacaatcatacctcttcttggtatcttgcattgtattggcttcatttattcaatatgtaccatctatcttagcagtaatcaaattcaagcatactaatgaatttccaaataacggttttaagctcccattcggctatgttattccagctttggcattaattatttcatgctacatggtaaccaatttcacttggaaaactattttggtcggaatagtcgtaggggtattagccgcagtagcttacttcttcattgaaaaagatgaagaaaagcatcaaaagtatttgtcaaaaatgcgtaataaataattttcaagttataaggacgatgactagaaactgtcaaatcttttgtgtaaatagttctttctcgtaaattgattttttaattatttatttaatcaaagtaggattctaaggtgtcctgaacctgaccaaagcctttatgaattcgattgaaataacggtcattgtagctcattgcctgaataccaataaaagcatcaagcgactgttcagttggaaactctgccttaggcttagctttgcgcttgatcacattgttaaatgattcaatcatgttagtcgaataaattgaagctctgatctgcttgggatagttataaaagaccagcagatctggttctatgtctttcaagcttctgataacatggctgtaaaccttgccccatttggtatagaagtcatgcaggacagctgtggcttcttctttgtttgtctgttgatgcacctgtttgaattcgttcatgatcttttcacgatcgtcgacgcgtactttagcgcagatattgcgcatgacatgaaccaaacagcgttgaaaatgagctttaggataagtcctggccaaggctgttttcatgccaacaacaccatcagaaagaaaaagctcaacttgctttaagcctcgggatttcatgttttgaagcatatctgtccagacttcaatgttctcgctaggtgcaatgcagtagtcaatgacctccttgtgcccattaggcttgatgccaatggcaatatagactgcttcacgctcaaatgtttctcggcgcaaaggaaggtatgtcgcatccaaatagacgcagaaaaacttgtcgcttagcttgcgtttgtggtaagcctcaacctttggaatcatctgcttggaaatatttgatacctgagctggactgtaatggctgccatacatcttttcaattagatcggctatttccctggtggtcacgcccttggagtaaagcttgataatcatgctttccaagatatccgagtgctgcttgtagccaggcagcgtgtgctgatgaaattgaccgttgcgatcccgaggcacttgcacttcaattgggccaaattgcgtatcaactttgcggaaataagcaccatttctagagttgccagtattccagccatttctggcatagggatcatagcccagaaaggcagtcaattcagcttctaacaagttattaacagcctgttgtagctctttgcgcaataaatcatttattttgtctggattgaatagagcttgagcaaaatctttggtaaaatcattcatgaaggagttcttctttctgtatgtgtttttttgttcaaaccaatcatacgagaaaggaactcctttttctaatgtttaaagaaataaatttaaggaatcattcatccttacacaaactattttacagtctcgatgactatccaatatcgcccttattttttgatcaattaagactttttagtctgcttttaaatctatttttcaacttatacattatgaaagcccatctcctcttaataatatttagtgctaaactgttagatagattagtattagaaaagagcaacaacaaatgagtaatcagaaagctaaaataaataataccgaaattaaaactagagtatctcacttcagaccaagccagtaaaaaaattcaagttaacataaaaggaaaaccatatgtctgaagagataattaacacagtcacaacaaaaaatgattttaagagtgcattaagaaatgcgggtattaaagatgatgataccgtattagttcatactgcactaagtaaattctattacgttcctaatggtccagaaaccattgtcgaagccttaaaagaagctgtgcctaatggaacaataatgatgccctcacaagtttctacgaattgtgatccagccacttgggaatatccaccagtacaaaaatctttgattcaagtagttaaggatgctatgccaccttataatcctacaacatcaatgacagaaggcttaggggttacgccagagtatttcagaactttgccagatgttgttcgaagtacccatccttacttgccaattgctatttggggcaaaaacaaagtaaagattgcacagaatcaacctttaaatattccttatggaattgacagtcctttagattatttgtaccagaataatggcaaaactatctttttaggcactgattatgaaacgtgtacagttttgcactatgcagaatccacaattggtagaaaaaccgaaacatgttctgctgcaactagtctggatgaaagcggcaaaactatttggactgaatatcaaaatattgatatggattcatatgatgactttaatgaattagggacagagtttgaagcaaagcatccctctgctatcaaaaaggttaagttaaacaatggtgtcatcaaagcaataaatgtaaaaccgctaattgattttgctagaaaatggtttataaaaaaagacaataatcattcaatttaataataaaaggaagaagtcactttcaacttcttcctttttctttatttaatctttgttaaaacctttgcacctatatttaaacctacactatgcgatttaccgccccaatcacgttcatcataattatccatatcagctaaagtatctgcagtgaaaagaaattgtgcaaaatcaatctttctaaactgagcacatgctgctaaagctgcacattccatttctacagttgacgcgcctaactgacgaaattgtgccacttttttaggcgtttctctaaagaaaccatctgttgtccaagtcgttatctcgtcatattctatatttagctcaactaaaatcttttctacttccttcaaaaatatagaatctagttccacaagttgtccaggattcatatagtgaaaagatgtcccttcatctcgaattgcacgtgttggaagtagcatcgcattttcaggtaaatctactaaggcacctgctgttccaatggttaacaccttttctactccataagcaattagccattcaagcaactgtacagctgccggtgctcccaagggcgcttgacacaaagtgaaaaattcgttattaatttgaacttcataaattttaggattaaaagaacatgactcaaattcacctaaagtacggtgaaaatggtgatctaaaaatgcattaatttctttttccggcacgaatgcgtaaagcaatcttggatgaaaatgaaatggttcttgatcgtgatttggttcaagaaccgcatgaggatgtttgtcaaagtctaaaatgaatggttgtttgttcatattttacactccatttttagttgaaatattatcataaactcgctaatacctgagatccaatattcaagctaacgctatatgaatcatggccccagttacgtttatcatagttatccatatcagctaaactatcggcagtaaacaaaatttgtgcaaaacttatatttctaaattctgcacaagcagctaaagctgagcactccatttctacagtttttgcacctagttttttagcttgcaaaacttgattaggtgtttctctaaaaaatccatctgttgtccaagttgttccctcttcatattggaaacctaaattttttatttcattctcaactcttcttacaaaatttttatctaatgcaataatcttacttggttctttgtagtaaaaagatgtcccctctccgcgaatcgcttcttgagggacaaacatcgtgttttcaggtagattatccaaagctcctgcgtttccaacagataaaacttgtttaactccataattgatcaaccagtctaaaaactttgttgaagctggtgctcccactggagcttgacataacgtaattagttgattattgacttccacttcatatattttaggtctaaacgaaacagttttaaatttgcccagagtcttatgagagtgtttatctaaaaacgagttaatttcatcatctgggacaaatgcaaaaagcaatttttcatgaaacttatactctaaattttcgactccaggttctattacagcttttttacttaaatcaatatctaaaacaaatgatccttcattcatatacgcgtggtgctagttaaatcgttctagacaataagccaaattataagctaaaattgcaatttccaaccggctttgaaagcctatcagactacgtgctcgattgttctcggcattgtaataggtcagaagcgaaaagtcgctttcaattgttctgcgaatagccatcaattgatgatcattgtgctttttagctcctgtcatatttttacgatatggtgtccaaagttcgtaacccatttgttttagctgttgatgcagttctttgcctaaatagccttcgtcgccaagaagatagtaattagatggatgggtattttctatcagttcaactgtctccctggcatcatgaactgatgcctttgttacgacataatcaagaatgtaaccgtcatcgctaacaatggcatgaactttgaaaccatagaagtaaattttcttggtggccttataaccaatgttggcataaccgcgaaaaattttagcacgatagtttcgaattggttggcaaacaggtaccggaaagctgtcaatgatcaagaactgtccattcaggtcaacctttttattcatttcttgccgtatctgataaatcaattgcaatagctgacgtgaacgccgattaaaacgtgagtgtgataaacaattgaaacattcacagaatcttctttgtgattcaattcctgtcttagcttgccagataagtaaagccaaaatcagactgtccgtagttttaatttgatcaatatttcgccgatgagtaaactcagccggtgcatacaaacgataccagtgccgacaaattatcactaaatctttaaaactaacttgtaaatggtggctaaaacgcttaagcttaaggcagttcaatcagatcagactcttttctattattactatttacaagtcgagtctaacaagattggacttttttattaactaaaacgatttaactagcaccacgcgtattcatatatattctcccttaatcaataaatggatagtcttcattaaagtaatgatcaataaaaatttgatgttgcttgttaaaaatcttggataatttatctttagaaaaatacttcagatcaagagtttcagagctaatctcttttgacattttttctactaattcaacagttactgcctgtgccacatcttgattaggataatgctggataaaattagttgaaacgcctaatagtgacttagttcttacttttaagccagtttcttctaaaaattctcgaacgcatgcttttggagctgattctccaaattctaaagcaccaccaggtaagccccatgcattaaaatctgatcttttttgaagtaagatttcattcttgctattagccaaaattccaccagcaaaatttagaataattggttcatgaccaactttttggcgtaaggtcttaatatagtttttaaccatcgctagtcctctacttgaatatcattcatcacaatttcaacttcatcgtctaaattaatctgactagtaaaagcatactcgggaataaaaccaaaataatctttttcattccaccatgagcgcattgtttcttcaccaaaagaatgttcatgacgagttttatggcgtttcattgtttcttcaaacggaatatcaaaataataggcataaatttgatcaccaaaaagctgctgagattttttgaataaatcagcataccatttcgcattcaagataccttctaaaatagtgtaagaacagtgatgataaccatactcaagcaagttttctaataatggcaaagcaaatgtcttttctccgtctttaacattcagcatttctcttctaactgtatcttgtggaatcaatagtgtattgtgtggcaatcgacgatggatttctttagacagtgtagttttgccactgccagagtttcctcgaattataattaattttgatgtcatcatagaaatcttcactttcttaaaattaattcactgcatctctaattgttgcaaacttatcaaatgtataatctattataatctataccatgaattttaacaataggcagcattttccctttttgtcccatcaataatcctgcagaagcggctagcatgtcacagatagtttcaacattagttttatcttgatactgactttttcttaaaccagaaacaccatacaatccaattgctacttgagttgcaccttttttatcaattcttccatcactatcggtaattatgatagctactctgacttttaattgatcaaaaatatcatcactaattctcttagcaatttcatcacaatttttaggtaaaactattgcagtaccagcatcaattttatctacacctgcactagttaaaaacaaaccattcggcaaccacccaccaataaagttcttagatatctttagtttcttaccactcttatcttcggtttgatcaattataatctgaattagtcttggagcttttctaggtatttgctgatgcaaacgtaaggctaattgacttggattaatagaatttaagtgaacaaacagaccttcagatttagaaatcaatttagaagcaatacataaaacatcattatcgcgtatattaaatccttcatttttgattgtcctaattatttctgcacttaagttgcactttctctctattttcggaaaattatgcagcgcttcaattgtaatcatgactataacctcaaatcagatgttaatttgcccaaaacagtaatttcgtttctatcgcaatacttcaatgtttttatgatcggttaccatgatttatctggtatctttctcctttattaatggtattgttagcaaaacaacaccaaaatacactgcggatacaaaaaacattacttttaagtctccaaatactttcataatactattgcttataaataatgaaatactaaccaagatctctgcaataaatgaaacagttgaaagcatagtcgacttattgctttctccataaatggcttcattactagtagctgaaatttgtcccgacatcattcccatcaatagttcaattaatagaaaaaggcaaagcagtaaatatttattttttagagtaccacttaatataaatgctccaatcatacttccagtattcaacaaagtaatcccttttgaattaaaggaagtagaaattttactaaataaaatcgaacctagaattaatgcacacataaataatgtataaactagtgaaagattaaagcctaatttttcaacataaataatcgaccagtagataaggataaactgcgttccacaatcataacccacattcagcaacaacaaaatccagaaatttctttttctaaaaaagccaacaatatttttaatattatatttatctttctttttactagaagccctattatctgaaaagataagaaacttgtcataagccaaataaaggctggatataacacaagtccaagcattgcgaaccatattagtgcagtatctttaattccaaatagccaagtcccaatatttccaccgattaatgtggttaaattcaaaataattatttgcatccccattagtttgctactaggggcaattttattttgttcctgtaagtcagttacataggcaagtaaagtacctgaattaagagctaagccaataccatataaaagctctgccgctgaaaagaaaaagaagtttctaaatagaattagaatgaaaaaactcgtggcaataactaaagatgataaagctaaaactttcaatcttccaattctatcagctaaatatcctgctggaagaagaccaaatacaataccgatattttgaaaagattttattgaaccaatatttgcatccgggattccatttttagcataaaataatgaaaaaattcctgacattgatgatcggaaaagtgtaaaaactgctgtaaaaactaaaaataaaattgcaattttaaaacttacactttttagcctcatgatcatcaactcctattattttttaagagactgtaaaatagtttgtgtaaggatgaatgattccttaaatttatttctttaaacattagaaaaaggagttcctttctcgtatgattggtttgaacaaaaaaacacatacagaaagaagaactccttcatgaatgattttaccaaagattttgctcaagctctattcaatccagacaaaataaatgatttattgcgcaaagagctacaacaggctgttaataaattgctagaagctgaattgactgcctttctgggctatgatccctatgccagaaatggctggaatactggcaactctagaaatggtgcttatttccgcaaagttgatacgcaatttggcccaattgaagtgcaagtgcctcgggatcgcaacggtcagtttcatcagcacacgctgcctggctacaagcagcactcggatatcttggaaagcatgattatcaagctttactccaagggcgtgaccaccagggaaatagccgatctaattgaaaagatgtatggcagccattacagtccagctcaggtatcaaatatttccaagcagatgattccaaaggttgaggcttaccacaaacgcaagctaagcgacaagtttttctgcgtctatttggatgcgacataccttcctttgcgccgagaaacatttgagcgtgaagcagtctatattgccattggcatcaagcctaatgggcacaaggaggtcattgactactgcattgcacctagcgagaacattgaagtctggacagatatgcttcaaaacatgaaatcccgaggcttaaagcaagttgagctttttctttctgatggtgttgttggcatgaaaacagccttggccaggacttatcctaaagctcattttcaacgctgtttggttcatgtcatgcgcaatatctgcgctaaagtacgcgtcgacgatcgtgaaaagatcatgaacgaattcaaacaggtgcatcaacagacaaacaaagaagaagccacagctgtcctgcatgacttctataccaaatggggcaaggtttacagccatgttatcagaagcttgaaagacatagaaccagatctgctggtcttttataactatcccaagcagatcagagcttcaatttattcgactaacatgattgaatcatttaacaatgtgatcaagcgcaaagctaagcctaaggcagagtttccaactgaacagtcgcttgatgcttttattggcattcaggcaatgagctacaatgaccgttatttcaatcgaattcataaaggctttggtcaggttcaggacaccttagaatcctactttgattaaataaataattaaaaaatcaatttacgagaaagatctatttacacaaaagatttgacagtttcttttttaagatctataacctctttaactatttctgcaatttgttttggatattcaaaatgtatatagtgagattcgcctaatgttataactttagatttaggattatttgaagtgtattctgaccgcttatattcattttcacgatacttttctgtaataacaatacttggtgttttatcacttatcctggtagtatttttccaaaacgaatcattttcgtaggctgcttgtgcgtttaaattatccttttcatcaaatttcttcgcattttgctctgtagttgtccaaaactttttattttcttctggagtaaaaatttctctaagatcagcttcaattttttcttgaagttttgccatgtttttatttttctcaatataagctggttcctttggaggatttaacatgatttctctagtagttggctcaattcctacaaaagccttcaaattattgattttatctttcatttgcatagcatacacaccgccaatgctatgagccaaaattataactttttttgcattaaaatcgttaataattttagctaatttagtagcttcgtctgatactgtatagtcctttaaagacttgccactaaagccactattcaaataatctgatgcaaaatagccatacttattgggcaaagcttcaattacttttgaaaaagattgtgctgtatcaaaactaccaaagccattcaaaaaaacaactaatggatctccctttcgataggcaaaattaatcttgcctaattcagtttcaatatcgcttctttgcataaatttctccctttattaaaactttgaagtcgttatattttaattatttcttagcacaaataccttatgcccattttcatcatcttttaaatacacgaatcagcttctagcaatttattaacagcctgttgtagctctttgcgcaataaatcatttattttgtctggattgaatagagcttgagcaaaatctttggtaaaatcattcatgaaggagttcttctttctgtatgtgtttttttgttcaaaccaatcatacgagaaaggaactcctttttctaatgtttaaagaaataaatttaaggaatcattcatccttacacaaactattttacagtctcgcctgcggcatcatatcttgaatctgcttcttggcccgctttaatatttttcccggccatttttaccaaattgcccacctgcatatggctaatattaaagccagacaggcaattgactgctagagcagtattgcgataagtggcaacgctgcttacttctaagatgtttttgactgctaaaatactgtagcgcttgtatttgtcaaagcccattaattcatccaagggataccttgcttgtttgcctgggcagacatatcttcttctgacatacctaacttcgccaaaagccatattgattgagcgctcattcttcttatcaatctgatagccctgtgctttaaccttggtaatcatttcatcatcaactttagctaaagccaaggccatgatttccttaatcaggtttaagaagaaacagattatttttctttcacgcttaatataattatcttcagactttataatatttgcgatttcagttacaattgaattcataaaagaccagcttctaatgtgttttttgttcttaacatcagactactggtctttttgtttgagctcaagtccaaattcaaaggacttgggcttttttaattatttattcaacttaccgtaaaaaattatacacttagtgacgaaatttttgctattcaaagtgctcaaaaagagacgcgtaatcgttatctaaaaaaacaaaaagctatgttggcagaacatgatcttttacccgaaaaaaagcgcaaaccacgtgcccgcatgttatcagagctgaatttaaacaacgatgatgctattttaacttttgccaataaagttaaggttttcaccagtggacccgagttgtttgaccaaataattgctgatcttaagcaagctaaaacatcgattagtttagagttctacactttttataatgataatctaggaaagcgtgtcttacgggccttagaagaggcttctgctaaaggagtaaaagtcagagttatttatgatgtctctggctcacgtggtactaaacctgctttttttaatcatttaagagagcttggtggcgaagcacagcctttcatttctacttctaaaaagcattggtttactacaccacgactaaattatcatttacaccgcaaattaatcgtaatcgaccatcatattggctatattggtggctttaacatcggtgatcagtacgttaatcaatctaaaaaatttggtcattggcgcgatacacatttacgtgttgtgggtcaatcacctatcctaatggagacacgctttgccatggattggaatacttctatcagacgaactgcattacctaaatttgatctaagcgaattacatgcttttactgtcgaacgtaaagatcttgacaacgatgataacgtagcaatgcaaatcgtttcttcaggtcccgataaccaacattatggcattcgccgaggatatgagggcatcattgctggggctaaaaactatatctatattcaaacaccctatttaattcctgaagaatccattttagaagcattaattattgctgctaatagcggtgttgatgtacgcatcatgatcccttgcatgccagatcatccctttgtttaccgagctaccgaatattatgcaaaatatttagttgctcatggcgttaaaatttacaaatataatgatggcttcatccatgccaaaacaatggtttctggctccaatatctcatctgttggttcagccaatcaagacttcagaagttataccttaaacttcgaggttaacgcttttaattacaatattcaattaactcaagaacttaaacaaatttttgaaaaggacctagctagttgcagtcttctaactaatgaatactttaatcagcaatctaaatggcttaagtttaaacaatacttttcacgtctgttggcacctattttttagaaataataaaaccacgaagcaaaaacttcgtggtatttttttacagattattataaagatcctgcatttcatcatcttctggagctaacttaagatatctttctagcagttgttttgttatttcatcattattttgtacattgaaaaagattatcatttggcgcaaaaagtctggattatccttgaaatccggataagctagtaaaaattcgctctgtgctttctgaatatcatccaaatcctcatatgataatgccatattccaatgtgcctgtggctccacgctttcctcatctaagttactaaataaggcaatattctccttagcctggtgttcatgaacatataggttagatagctgcatacgtaaatcactattgtctggcgctacttttaaccccttttcaagtaagtcacgagctgtatccaattcattcaaattagctgctgcacgtgctcccattgaataaagtgtttcatccagttcattgtacgctaatcctgcttgagcagtcctcaatacttgttcattgtcatgctgatgatcataagcttgtgctaataatggatacgcatttacatagtcaggactttgctcaatcacttcatctaagaacttaattgcctgcttatcatcacctacagataagagaactaatcctgcttcatacttagaatcaatatctaaaatactatttgcatgttcacgaataactttggcagcttcttcataattacctaatttggcaaaagtcgcaaataatctttggtacagatttacttcactaaaagtactttgacgtttgattaaatcttgatataactcaagtgcttgttcataattaccacttaaatattcaatctctgctaaaccaaatttaatagcatcttcttctggagctaattgtagtgctcgtattaatttgtccttagctgtttctattaagccgttagtttggtaataatcagcttgtactaatagactatccaaataagctgaagagctctcagggacattatataaaagcgacagaccatcgtcatcatcgccatcatttaacataatctctgccaagtaaactttaaataaatcttctttaggaaatttagctattaaagctcgatatatttcttttgctaaatctgtaaaacctaagccagttaggttttctgctaaagatgacaagacctcgggagcatcattatctaaagcttcttttaaaaggtgtttgttttgtgaaaaatcatgattttgaattgcatctagtaattgttcagaataactcataatacctccaatcaagttaccattgtactaaaaaaagacgccggaacaaagtccaacgtcctatcacattagttaagctattacttaacggcatccttaagagctttacctggcttaaatgcaggtacttcactagctgggatttcgatttcatcaccagtttgtgggttacggcccttacgagcagcacggtgacgtacttcaaaagtaccaaaaccgattaattgtaccttttcacccttagcaaggttttcttgaattgaatcaaggatagcatcaacagtatttgcaacttgcttcttagttaacttagtttttgaagcaacttctgaaactaattcagccttatttgccatgaataattcacctcctgaatttgaacctaatgttcaaaaaatttttctttgtttaagctaaacaaggaaaaatgatcacaactaatcatgttccctaaaaacaaaaatatcacaaaaaccttataacaacaaggttttttatgatattttgcttatcttttatttacgtttacgtggtaaaatcttgattggtgtacccgtaaaatcaaagttttgtcgtaattgattaatcaaaaatcgttcatatgagaagtgcatcaattctggatcattcacaaatacaacaaaagtcggtggattcgtacttacttgggtcatgtaataaacacgcaatctcttacccttcaccattggagttggaactaacttacttgcttcaagcaacaaatcatttaagacactagattgaattctttgattttgattatcatagacttctttaaccatattaggaatttgatctaatctttgacctgtcttggcagaaacaaaaagaataggagcatagtccaaatattgaaattcatctctaatttcacgttcaaattctttagcgcttgtactattctttttcggcaaatcccatttgttaacgacaatgatgattccacgacccgcctcgtgagcatatccagccacatgcttgtcttgttctctaatgcctgtacttgcatcgaggacaagtaaaaccacgtctgaacgctcaatagcactcatagcgcgcattacagagtacttttctgtcttctcatacactttgcctcgtcttctgattccggcagtatcaacgaccttaaattttacaccatcatgagtaaacggcgtatcgacagcatcacgagttgttccttcttcattagcaacaattacccgatcttcaccaagtaatttgttaacaattgaagacttacctacatttggtcgaccaatcacgctaaaagaaataacatcatcagcttcagtatctttatcgtcaggaaaatcattaacaatctgatcaagcaaatcaccaataccagtaccatgactacttgaaacaggaatcggatcccccaatcctaaactatagaaatcataaatatcgcttcgctgttcaggattatcagctttatttacagctaaaataactggctttttagtacggtaaagaagatgagctattctttcgtctaaatctgtcacgtgatttaccacattggttaacatcacgataacatctgcttcttcaattgcaatttctgcctgagctctgatttcttcctcgatcttgccaccttcccaggtaataccaccagtatcgatcaaatcaaacttatgccccatccattcggcttgagcataattacgatctcgggtaacaccgggtttgtcctcaacaatagctaaacgttgattaattattctattgaaaagtgttgatttaccaacattgggttgaccaacaattgcaacaactggtaaaaccatttctcgccctcctttactaatctaaacataaataaaaaagccgactcaagtcggcttttttataaaatgactacttacggtcctttaattggtcaccaatgatgtcacctaatgcaaagccgttgtcgttatcactcatgtacttcttgtttactgaattttcgttacgtgaacgacgtggacgagaattatgattttctgaagaagcatttgagtcagcagccttgattgaaagtgagattcttctatcacttgggtcaatgttcaaaaccttaaccttaacactttgaccaacctttaaaacatcgcttggcttgtcaacatgcttgtttgagatttctgaaacgtgtaccaaaccttgaataccatcagcaacttcaacgaaagcaccaaagttagttaatgactttacttcaccttcaaaaatatcgccttcgtttaagtcagctgtagcttgttcaaatggagaaggttcagtttgcttaatagacagggaaatacgatgtctgtcattgtcgataccaatgaccttaaccttaacatcttgaccaacctttaaaacatcgcttggcttatcaacgtgcttgtaagaaatttctgaaatatgaactaaaccgtcaacaccaccaacatcgatgaatgcaccgaagttagtcaaacgtgaaaccttaccttcaacaacgtcaccaacaactaattgtgatgcaaccttgtcaaatgcttcttcacgttcttcttcaactaaatccttgtgtgaaaggattaagcggttcttgttaggatcaatttcggtaatcttaagtttcatagtcttaccaatgtaaggcttaagatctgaaacgtaacggtttgaaattaatgaagctggtaagaaaccacgtgtaccaacatcaacaattaaaccaccacgaactgatgaagttacagtaccttcgacagcatttccgtcttcgaagtctttttgtaacttgtcgtaggcttctctttcctttaagcgggtaactgagaagaagaattcaccattttccttgtcgccaccggctcttcttaatactaaggccttaaacttgtcaccaggcttaactaaatcacgtaagtctgcgttacggtctgaagtgtattcacgacgagtaatgacaccttcaacaccagcgttttcaacaccaacatcgatttggccgtcttcaatgtctaatacttcgacatcgacaatatctccgacctcaactccttgcatttgctttaatgcgtctaaaaattgattactgttttctgacatatgtacctcccaatattatgtcccattttataggaaaccgagatatttttctactattttgtgctattttttctaatttttttgttttttttcgatttgagctaaaattgcctctacaacttcgtcaatcgacatgtttgtggtgtcaatttcaattgcatcatctgccttttttagcggtgaaattttgcggtgagaatctttataatctcttgctgcaatatctttttcaatttcatcaactgtttgatcagatttaataccacgctctttaaaatctaataaacgacgttcagcacgtgatcttgctgaagcaactaaaaagatcttaacttcagagttaggtaaaacagtcgtaccaatatcgcgaccatccataatgacatttgtcttgcctgccatttcacgttgcagacttaccattttttctcgtactttcggcaaagcggatacttccgaaacattagctgaaatttcaggcgttctaatttctttagaaacgtcctttccagctacatatactttttgctcaccattttcagatttcaattcaattccatcttcatcaatggcattcaagatacccgcttcatcaccataatctaagttatgattacgagcaatcactgtacatgcacgatacattgcccctgtgtctatatagacaaaggataatttacttgcaatgattttagcaactgtacttttacctgctgatgcaggaccatctactgctacttgcattctaataaaaaagagatcttatcatcgaccccttttatcctttctgaaagattatttcaacttaagtgtctgacctgcttcaatatttgaagagtctttaagattatttaatctggctaattcatcaacagtcaagccattcttttctgcaatttcatttaaagtatctccactttggactaaataagtcttaagagtagcagaactactagatgagcttgaactagccttttcagactttttcttgctaaaagaagatgatgaggttttcttagtcttaacagacttggatgatttagaagaaaccttcttaactgtttgaacttcttcagctttttctgaatggcttgaagccaaacgatgaacaactgggataagtgcaattaaaataaccgctaaaattataataactgctatccaacgtgctgatccactaggctgactatcttgtgagcttcgcttttcagtaggtcgttcatagtgctgatatggcccggttgactttttatccatcaaaaattcctccattcacttaacggattaattttagcatattttaggatgctttgaatatgaaaaatcccatcaacttaaaaaattgatgggatgataacttaattcaaattaaatctcttacgaacgaatggcttaattgttttcaaggtagcttcaaacaataagtaaacagccacagcgttaattaatccttttaacaagttaaagggcatgataatactaaaaatgtaggttgacattgatggtaaatgcaataactgacccaagtaaactttctcagtaaagcttaacaaggcactatagctattaatagcaggcaagtttggtaccgctgttactgcgtaaataggagtcaaaacgaaggcattagccaatgacatcactgctgccattgcgataatcccaattaccaaaccacaaattggtttaactctgcccatcattgtcttgcggttatccgcactcacatttttacttaataaataaaatggaactgcaaatgacattgaagctaagaatgctgctagatttccaacaaggcttggtaatgcaaaaccactaaaaattaaactaagtaacattcgaattaaagcaataataactcccggtacaatgccaaaaataaacattccaattgtaataatgacatctgaaaaatcaaactttaagaaggcaactccaggcatgattggaaattcaaatttcataactacaaaagcaatacagccaattaaagcatatgcaatcacattagttaaactactattcttggatttagcttgatccataacttactttcctttcccaaaacaaaaggtctattgcttcagcaacagaccttaaaaagtgtagtaagtttttttagcctgtcttcttccatctagactttaactatcggtatctaacgattcaaccactgacgtgggtcgcggactttcaccgccggtcgggactttcaccctgccctgaagacaataaccttgaatatttaattacagttataatttagttcaattgcattaatttgtcaacttcatgcttcgataattcccgatattgccctgatgtaagcgaatccagagttaaaaaggcatatttttcacgagcaagcttatcaactaagtgacctactgctttaaacattcgcttaacttgatgataatgtccctcatgaattgtaatttggacaatttgtgtgtctttcttatgatcagttttcaatactttgaccttggcaggcgcagccttaaaatgatccaactttactccttgagtcaaggttttaatttcatcaggagttaaaatccctttaatcttggctacatagaccttagccacttcatttttagggtgcatcaataaatttgctaatttgccatcgttagtcattagcaataaacctgacgtatcataatctaatcttcctactggatacaaacgatatggtaaatcttcgaaataatcaactacagtttttctaccacgatcgtcttctgcagtcgaaacaacgccacgaggcttataaaacaaatacgtgtgtaggctttcccgctcaattggctcatcatcgactgtaatattactaaaagtatcgactttagtacctagcttagtaacaacatgcccatctactttaactcgaccggctacaatcattttttcagcttttcttcttgaagcgattcctgcttccgcaattactttttgtaatcgttctgccattttctatccctctttttctaaatgtttgtctgcgctaccttttgaatcgaataagtcaatctcctcaccatcagttgtatcctcaaagtcttcgattaacggtaaatcagccaaactttgataattaaaatattgtaaaaaataatcagttgtaacatacaacttaggatgacctggagcatcttttttgccgtcttgtttaattaatcctcgccaaatcaatgtctgtaaagctcctgatgaatttactccacgaatatcatcaatttctattctagtaattggttgtcgataagcaataattgagagaatttcaagtgctgattgactcaaattcttagttaaatctttttgaaaatacttttcaattatcttagctgtctgctgactagttgtcatcttataagtatttgcaatatgaattatttgcattcccgagtctggatcagccttcattttttgctgcaaacgagtgactaactgacctagctcttcaccatcaacttcaagtagttcaattagattttgctcctcaagcccattgtcacctgcgacatacaaaagagcttctaaatttgctagtttacttgccattcgtatcaattctttctaaatttaaatcaccgaattcacgtgcttgtgtaatctgaattaattgttttttacacaattctagtgtcgctaaaaataagccaataacatctgagatattctgcattttgtccgcgcaagcaaagaaactaacttgcctttttcgtttcaattgtccatgcaaaaaatccatcatctcattgatcggcgtttctgctactctaattgaagcggtatctggttgctgcaacttcaaacgatgtaagaccatcgtaaaagtcgtcgctaattcttgtgcagttatctgacccttaggcagcggttgaactttagcagtggttgatacactagcttctttagcaactgtaatcggtacttcttcattacgttctttaaaataagcagatattttcttaaacacagaatattgtaccaattgttgcactaattcgtctcttggatcttcatcaggttgaatatcatctacaaaatcgttttgaggcaacaaatactgtgatttaattcgcaataaagttgatgacatgacaaaatactcgcctgcaatttgtaaatttaagctttgcatttggcgcaagtattctaaatattgactagttatttgggcaattgggatatcataaatatcaattttttgcgattggatcaaatgcagtaataaatcaagtggtccttcaaaattcggtaattctaaagttaagttacttttgtccattatcttcttctaccgtttttaataaatttgtatattctggtacagcagttattcgtttatctggatattcgtgctttagttcatcaacaattttccgttcataactaatctcacgaaaaccaggagctaaagacaaatatctaataattacaaactgattagatacttgggttcctattacgcccaccatattattttgactattacgataaagatacaaaataaagtcattttcatcctgattaagcgtgatttcttcttttaagttttcgatatttttaaaatcaggtaaataggatagtaatcccattgctatcttctcataatcttttttatattgtattagcatttaatcacctaaagacgaggatgtgtcttctgataaacatttaaaatttgcttttgtgataaattggtatagatctgtgtcgtgctaatatcagaatgtcctaatatttcttgcactactcgcaaatctgcgccgttttctagcaaatgtgttgcaaacgtatgacgtaaagtgtgtggcgtgacatctttagtaattgccgccatttgacaatactttttgatcatctgccaaatagcctgtcgtgtaatcttttttcctcgattatttaaaaaaatatgttcatcgcttttccctacttgtaaaattagcggatcacgaacttcattttcatatttttttatccaatcaagagcaacaggactaattggaatcaatcgttctttttcgcctttaccaagaacccgaactaagcctaaatcgtcatgtaaatcctgcaactccaaattaattaattcgcttactctcattcccgtggcatataatgtctctaagatagcacgatcacgtatacctaactttcgtttagtatttggctgctcaagtagcctattcatttcagcttgagagagagctgtcggcaaacgacgttcttttttaggcaaatcgatttccaacattggatttaacttttgaatattttgccgagctaaccattgataaaatttacgcatgctagaaataagtcgactaattgagctggttgctttgttcaaatcacgctgccgagctaaaaacgcatccacatcgcttgcttcagttggccatgaagccataccttcattttctacaaaagtttgaaattcttctaaatcttgacgataagcattaattgtattatcacttaatcctcgttcaacttgactatagcgtaaataatcatcaatttgatcttttaaattaatcttctccattatcgttctcttctggatccttaattaaagtaatcgtacctgctgttttatcttcttcaattaatccagccttgagcaaatgaccgaccgcacgtttaaaagctgattttgaaataccaaagtatgatttaatttcttgtgcacttgatttgtcatagaaaggtagagtcttggtttctcttctccgcaaactcatcaaaatcatttgcgcatcatcatcaatttcttcaaaagcacgaggcaaagcactcaaattcaaacgtccatattgactgacaccgactactctacccttgaattgctcacctagtctcataggacgtggcatctgcgattcatgtacaaagccaagataataatcactagttaaaacaaatgctcctatctctcgtgtaacataaaccgttgcaaagacattttcattattcattccacgtggaaagttagcagctaattggtcaaaaatattttcatctgctagcttagcccaaatacgatctttttcgtcagtttctaatcttactaaaagtcgatcatcacgtcgaggccatctttctttttctctaggaagatcatccattgataaaacaacgtctttatcaggtagacctacatcaacaaagacgcctaagcctggacgtacctcggttacttttccccaaccatattgatcgggttgcgcgaatggcaaaaattgtgtcatttctcgatcatgacttttattatcataaataaaaccttcgacttcatctccaattttaggaatatcatcttgcgtaatctcgatcttcttcaattcataagtcagtccatcaatttgaacataataagctttatcgttttcgtcagtaatttttcctttacgaactgttccaagcatttaaaaatctcctactttacatattcttacatataagtataagagatttttatgcaaaataaaatagccagcacttaagctggctattttttgattagctaatctatctaaattatattcttaaaattaaaggtttgagattttgccttggtagatagcaccacgacgagcgtcaacagtaatagttgaaccatcagaaatcttgtcagtagcgtcagtagcaccaacaacaactgggatacctaatgataaaccgataactgcggcatgtgaagttaaacctgaagcttctacaactaagcctgaagctttcttgatagctgggttgtagtctgggtcagtagtcttagcaactaagatgtcgccttccttaaccttgctatttgcttcttcagctgagttagctacaacagccttgccgataactgaaccgttaccaacacctaagccttgaactaacttgttaccgatgatttgtaacttcattaagttagttgtacctgagtcaccaagtggagtacctgcaacgataattacaaggtcgccatcctttacgtaacccttttccttagctaccttagcagccatttcaaacatgtcatcagttgacttaggcttttcagtcaatactggttgtacaccccaaacgatacccaatgagtgttgaaccttttcgtcaaaggtcatagcaataatgtcagcatttggacggtacttagaaatcatacgtgcagtgtaacctgagttagttgcagtaatgatagtcttaacacctaattcttgagcagtacgtacaactgattcaccgatagcttcagttacgtttgaacccttgtaagcttcgaatctttgaagagctaaagtattacgcttaagcatttgcttttcagtacgttcgtcaatttcagccatagccttaacagccttaactgggtaaagaccatttgctgattcacctgaaagcatagttgcgtcagtaccatcaagaacagcgttagcaacgtctgaaacttcggcacgagttggacgtgggttttcttgcattgagtcaagcatttgagtagcagtaataactggcttaccaagtgcgttagccttgcggattaggctcttttgtacaaatggaacttccataaatggaatttcaacacccatgtcaccacgagcaaccattaaaccatctgaaacttgcaaaatttcgtctgcgttgtcgataccttcttgagattcaatctttgggaagatcttaacgtagtctgcacctgcttcttcacaaagcttacggatgtctaagatatcttgagccttacgtgcaaatgaagcagtaatgaagttaataccatagttcaaaccaaacttaatgtcatcagtatccttttcagtaatacctggaaggcgaatttcaacaccaggagcgttaacacccttctttgaaccgattacaccagtgttttgagcttcacaaacaagttctctctttgagtcgtccttttccttgatcaaaaggtcaaccaaaccatcatcgattaatacgtgaccaccaacgtgggtatcatcgtataaaccgtcgtaggtaacgtggatcatgtccttgttacccttcttagtggcatccattgatacacggatcatgtcaccagtattaatagtgaacttgccaccttcttgttcagtggttctgatttcagcacccttagtgtcaaggtcgataccaagaagtaaaccagtatccttttccacttgacgaaccatcttcatacgagcaaggtgttctgggtggtcaccgtgtgagaagttgaaacggaatacgtttgcaccagccttagctaaagcagtaatagtttcaatatcgtttgaagctggccctaaagtactaacaatcttagttttcttcattattaaaaaaatcctctccaaaaatcaactaaattaatatttagtcatttcttcatttacatccaataacgcataatcaccttggtgtttaccgtcaaacaaatcaagaatgtcgtgggtattaagttcaccattctccatgccgacagctaaaccgcccttcccatcgagaagtaacttaacagcataattacccatcttagtagcattaactctatctgtaacagtaggtgagccaccacgttgcatatgcgcaaggacattagcacgagcatcaaagtcaccatatttaaggagttcgtccttaaacttatcagcagccataacgccttctgctaaaacaatgataccatgatctttgccatctgcaaaaccacgagtaagagtttctgcaatttccttaacatcgtatgaacgttcaggaattacaattgcgtctgctccacttgctacaccgacacgcatagcgatatcaccacattcacgacccattacattaacaacgaatacgcggtggtgactgcttgcagtatcacgaattttatcgatagcatccatagcagtacgacaagcagaatcaaagccgatcgtgtagtcagtataaggaatatcattatcgatagttcctggtaaaccaactgagtttacgccgtggcgagtcaaggctaaagcaccatggtatgaaccgtcaccgccaattacgataaccgcatcaataccgtgtttctttaattgctcaacacccttttgttgcacttcttcttgtgcaaattcagggaaacgagcactgtacaagaaagtaccgccttcactaatcttgtggtcaacattttccgtggtaagcggaacaaagtcacctgcaaccaaaccagcgaaaccataacgaattccaaagacttcaagcccatgatggatagcagtcttcgtcacagctctaattgctgcattcataccaggggcgtctccgccactagttaaaataccaatccgtttcatgaattcacctcatcatgattattttgtgtaatttctcacatcacataaatattaacattttttaggcaaaaaagctcacaaaaattgggctaatttatgctttctttccgtatttaagtttgttagcacttacatccatcgtcaaagatagctttgtaatttgaactttattctttaaaattaacttttcgcaaattggttaagaaatactgttttttattttggtcaaatcgatcaccttgaaccttgactcctagtaaataaatatctccttcttttaaaatagagccaaatttttcataagccggtggaaaaataataatttcttgttcgctagatgtatcagcaaaactagcaaaagccattgtttttccatttttggtcctaatttgctttaacttcattaatttacccacgctaataccactatcatttaactgaaattgattcaatggtctagcgttaaatttttgtgcatatttttgtacagctattagaggagtagttgttgtagtaaagcctaaagctttctcttccatttctgctttttgggcagcagtcggtggctcagcaggcttaagtggtgcatccccagaatctcagataaagacatattttgtcccgttaattgcacattagcaattacatctttgcagttaagcaataactcattgcgattatcttcgattgagtcaaatgctccagccataatcaatgcttcaattgcgtctacttgtaagaacttagcatcgattctacgcaaaaaatcattaaaagacttatacggtttagtattggcagctatttccttagcaaaatcaagacgtaatcctttaattgcttttaaaccaactaaaatcttgccatcttgtaaagtatagtctaattggctgtgattgatatcaggcggcaaaatacgaactccagcttcctgagcttgcatcgaatagctttgcgctttagcagacgttgatgaattgagcatcgctgtgtaaaatgcagcaggataatgaaccttcaaataagctagccaaaaggcaatcttggtatatgccaccgcgtgtgaacggttaaaaccatagttagcaaattgctctatataatgataaactcgctcacctacttctttaggatgaccttttttgaccgtaccagcaataaattttccacgttcttgctcaatgacattctgattctttttagacatcgcacgtcgtaaaatatcggcttcacccaatgaaaatcctgccaggatttgagctgtttgcatgacttgttcctgataaaccaaaattccataagttgattgtaaaatttgctttaaactgggatcaggataatgcacagtagccgtaccattttttcttgcaacaaatgcgtcaatattttgcattggacctggacggtataaagcgttcaccgctactaggtcctcaaaattgtcgggatgcaatttacgcaaaacaccacgaatcccaccagattcaaattggaagactgcatctgttttaccttgttgaaacagttccattgttttgggatcatttaacggaattgtattaggatctagctttacaccttgctgccgcactaaagctaaaatattgcctaaaactgtcaaattgcgcaatcccaaaaagtcgatctttagcaaacctaatgattcaacatattttttggtttgctgagttacaggaatgccgaaaggaccagcctgcaatcccgaaatgccagcaatcgaatcatcactaatcaccaatccagccgcatgaatagaataatgccttggcaatccctcaagtcctaaagcagtcttaaataacaatttattctcaggcgttgcatcaaccaataatcttagttctctagactcttgatatgctttttttaatcccattttatctttagagtacgggattgcgtgagtccacttagtgatttctggtcctgttaagccaaaaacccggccaacgtctcttaatacttgtttagcagccattgtaccaaaagtcaaaatttgagcagcatgatccatgccatacttttgatacatatacttaattactgtattccgttgaatatcaggaatgtccagatcaatatcaggcatctcatgacgagccggatttaaaaaacgctcaaacagtaaattatattggatgggatcaacttcagtgatacgcaaatagtatgaaaccagtgaaccacaagctgaaccacgtcctggaccagtagtaatttttactcggtgacaatagttaattacatcccatacaatcaaaaaataatcatcgaaccccatctgattgatgactcgtaattcataatttaatcttttctgatactcggctggaatacttttttgaccaaagcgcgcttgtaaaccagtttgagccaaataacgcaaatattcttctgaagtcggaaacttatcttgatgatatttaggtaagaccggtttttgaaagatcacttcagcattacatttctgagcaattttccaagtattattaattgcatcatccaagtcatattgatgatagcgttctaaaacattttgtgcagaatctaaataatgcgaaccagcttgcttagctagtggcaatatatcttgcaatttatctcccttagcaatcgcacgcaaagttttttgtaaaaattgctcacgtggccgtaaatattgactatcttccactgcaactaaagataattcaaattgcttagctaatccacggacataatcaatgtaatctatacttgcttttgaagcatatacacccaaataaagatcaaacgttaacttctttagttggcgaacataatcactgcctaatgcctgatttgtatcatgcagcgccattaattcactttttagattagctggtacgataatcaacaaatcatctaaatatttggttaattcattcagcgttaagaccttatcgttttgcccattttccgttaacaaatttaccgcgctagaaagtcgcaataaattatgatagcccttatttgttttggcaaaaactagcaaatcatatttttgggtgctatcaaccaaaccatttaaacgcagttgcatcccaagaagtggtttaattcccgcctttttagccaactcataaaaattgaccaaaccataagtcacgttcacgtcggctaaaccaaccacaggatagcccttctctttagcgtcttttatcaaatcacttaccttggttggactacttaaaagcgtaaaggagcttatgttttgaagtgctgctacttgcataaattaaccacctttcgtcattacaaacattaaattaagtataccaaattgaaccaatcaggtttgaatttgcgcttcatttttgataaaatcttacacgaaagaaggaatcattatgggtcgttatatcatcacaactgtatggagcgtaatctacatgttagttgtaggctttattgctggtcctttaacccgaagtgcttcattcaacggcacagatttaagaaattgtgtaatcgttgggatcatttttggtattcttttctcagcaattattgcgactattactgctcgttcacacaaagataatagtaaatacagtaagttaaaataattattcaatctattcaaaaaagacgtgagatgtttttattctcacgtctttttcgtttggtttagtaaaacttataattcttttttgtatctacttcgactggtccatgagtcaaatattcgctaaacatttgtacatagtccttatccaaagtggtttcaattttgtccatactatattcaggataaaatcccccacccatagcacgatagttgttaactgctaaatgataaatctgatcatctttgattggcttaccgtgcaaagttagtttagtcagccgttcacctactggtctggataaatccgcttcatattcgactggataaaagacgtcaaaatgatacaacattggcttaggcttaatccatcgatcaataaagccaatgtttcctgcttcatctttcttcaaaaagccagcagagtgctcaataatatgacgtaattctttaccagtcagcttcacacgacacaactgattagcatacggataatttaacaaaacatctctcatagtaatggtcttatcaaatcccttagctgtctcactcatcactgcagttgccgaaacatcagctttagtaaaccataattgcatttgctggattaaattaataaatggcgcgccttctattctgcctttcattgcattttcaattcgagcaggtttatctaaatgtgcaattggttgatctagccatttttgtgttcttttatccaagtcagatacaatatcaacaattacaggatcaggatcataatctttagtgtcaatcaacttagtggacattgatttgattttcttagtatcatcatcaatatcaagaaccacttcagctacagcttcaccgcgataacctggttgaacaatagcagtatcgcgtgtaaccaaatttaagcgccgatgctggtgacctgtcaataggacatcaacttctggaattttggttaaaatctgataaccttcattttcaccacgattaggttcagtcgccttaccagtttcaggatcactttcaaagccaccatgatacatcacagctaaaatatcaacctgagggcgtaatattttggcataatgcttaattttttcgtaagcagaggcaaactttaagccttttacattttctttaggttcccaatgtgggatatattgcgttgtaatccccaataaaccaatctttaagccatttctcttgataatagtgtattctctacccaaaaatggaacttctgtttctgcatccagtacattatcattaatgattggtgcctcattgttatcaacatagtagcttaaataatctaatccaaagttaaaatcatggttacctaaacagcgagcatcataccccactgcattataagcttgcgtaaaaatacgtaaatcactataatcgccagttgaatgagcataggaagcaagtggtgagccttgcaaacaatcacctgcatcggtaactacaacattgttatcaccatactttttcttttcagatttaataactgagctaactctactcaaactaaaaggagcatgatagtcggttttattttggtaatcagttggcaacaaaaatccatgtgtatcactagaatgtaaaaatactaacttcattatttctttttcctttttctaggcataaaaaaagacaccatatcaaaggtgtcctttaactagttattgctgttgtcgttgttatttacaacttgacgacccttgtaataaccctttggtgaaacacggtggcttaagcggtattcaccagtagttgcatcatagtgcattgctggaacactcaacttaatgtgaccacgacgtgaacgtttcttttgtttagaagtatgtcttgcaggaactgccatttaatttgatctcctttattgtagtcttaagcttcagggtcatataaccccgaatcactcacgtagttcaatcatactattcaattgctaataaatcaagatttattctattttcttctcttttttattgaagaaagtgaccttgtgatccgttttttccttagtatctcgtccaaagaaccaagcaataatcatcccgataatcaccattaccactaacacaacaattagtagtaacctcaccttaaaaaagccaaaattaattgcgacaggtgatgtatttaaaacaacaaaaattactgcaattaaagccacaactgatccaataattaaatttctttgtttttccatctttttttactttctagaagcaaactttaaggaaatcttatcaccaatcgatggaaatagattatacaatttagccgctacagctaaactaagtggtaaatttaattcacgtttatcactgccaaagaagtgaactacttgccaagcaacatcatctggatccaacataaattcttgaacatttttgacataatttccagtcttatctgctacattaaggaaattagtataaactggtcctgggtttacagtcattaccttgacaccaaatggctttaattctagccgtaagacatttgaaaattgaattacggcagccttagatgaactgtaagcggctgacttggtagttggtaccttgccagcaattgagccaaaattaataatttgaccagtcttttgttccatcatgaccctacctactaaacgagtaaagtacatcaaacctaaaacattaacttggaacatattggtaacgtcttgcattttttggtccataaattcttcgaatttaccaaaaccagcacaattaactaaaaagtcaatgtgttttacttgtttagtaattgcattaaaggtttgttcaatttcttccggcttacccatatctgttggaaaaacatatgcttcagcaccggatagttctttagcttctgctgcaatttcatctaattggtcctttcttctagcaattaaaattacagtagcaccacgaccagcactttcaagggcaatggaacgtccaatcccacttgaagcacctgtaattacaacaactttatttcttaatgagtctttcatttttctgagcctttcattggaatattaatctgatcaaaatcattaactaatactgtattagaaaatacttttttagcctgtttttcgagttttttccctttagcacccatataacgagcagaaatatgatttagacataataatttaacattatctttccgagcaattttggctgcttcaaccgaagtagaatgataataatcatgcgccaatttttgttcatcccctgcaaaagttgattcatggactaaaacatctgcatctttagccaaacgagcaatacttggcgtggaacgtgtgtcatagatgaccgtcacaattcttcccggtttagtaggtcctaagaaatttttaccatccaaaacagtaccatcagctaaagttactttttcgccattttttaatttccccaaaagtggcccattaggaacattatactgtgctaacttgtcaattaataattcgcctggatgtgaagcctccactactctaaaaccaaaactaggtatccggtggtctagttgctccgtatacactcgaaagcccttatcctcacagattaaccctgatttagctaattcaacaaaccttatagaatatgaaattttagtccgagataccttaagagctgttctaacaaattcttcaataccactgggaccataaatagtaataggaccaacatcaccttgaaaagaacgagttgacaataaccctggtaacccaaaaatgtgatcaccgtgattatgtgatataaaaattttggtaacttttcgtaatttaatatttgttcttaaaatttgatgctgagttgcttcacctacgtcaaaaagccagatttcattcaattcatccagcaacttaagtgcaacactagaaacattgcgttgctttgaaggttgcccagcaccagtacctaaaaattgtaattccatgaaaatcctattctaatctaaaattttgaatgcttaacaattgttttggtaactaatgcactatagtattttgagccctttaaattagggtgagtatgatcaccgtagaaccagtcaggatgattcttcgagtatgaataccaatcaattattataagattatgataccgttttgcaccttgatttagcaaattattcactgaattttgccaatctctagttggaacgtgaacattaatccagaaaacttttctcttaggtccagcctgatgcattattcgatcaagatcttccattgagaaaggtccattagttcctaaccctattaagatattatctgctaaaactccttgactttgataactatctaataagccaaaagcaacattcaattgtcttgaaacagcagcatcaattaacgctttaggcattaatcgttttaaatcgttgctcgaaccggccattaccgagtcgccaatcgcagttacttgaacatgttgagccaattgcaaatctaactgggaaataccatatttaacaaaggatttgttaataggatgctttttagtttgaagctcagcttcacgaataattttagattttttttcttttttctttttttctttttttaacttttcaattaatttagcattatccgttttttgttttttagaattctgattaattcgctgtgctaattggcttttattaaagtcttctgcttttactcctggtgaaatagcaatagctgctgatcctaagattaaaatcaaagctgctaaggctgcttgacctttcttaaagtaatcttttgtttcaaaattaaaaattcgagcaaaatattgcttcgttttatcccaggtaatcctacccattggtctttcaatcaaacgataagtaatttctgtaatcactaaaattaaaatcacttcaataaggtgatacagcattggattatcaccaatatttaccttatcttcaaaaaagatcattactggaaattgatacagatagatgccataacttcgcgatccaatccaatcaaataacctattagttaggatttgattccaatgactaccaggatgagcaattaccgctactaaaatacatacatctaaagtaaataacaacatcccgccagagtaagtaaaggcttgttgtggattcatccacttagagaaaaacattgctaacattaaagcaaatgaagcaaggcccaccaagtccagtatccagcctacttttcgttcaacttgctgatttaaactctctatcggccaaacaactgctaatgctgctcctaatcctaaagaaaagaaacgagtatcagttccataataaattcgattaatatcagcctttaaaaagtataggattgccatttctaatgcagaaacagctgatagaccaactaaaatccagaaaatattttttttctttttaaccaatttaactagtaaataaatgacaattggccaaacaatataaaattggccttcaattgacatcgtccataaattagtaaatggtgattcattagctgcaaaacgctcaaaatagctttgaccattatgaatttgccaaaaattaaatacatttaatagatttgcaagtacaacctgatttaatttagccagtaaatttcgttgaaagataaagatataggctgcacttaaccataaaacagtaattaattgtggatataacttttttattcgactcaaataaaaatgacgattattatatgatcctgttttatcatatgaattaaacatatgatctgtcaccaaatatcctgagagcacgaaaaaaatcggcactcccagatatcctcccataaaggaattaggatccaaatgataaagaattactccgataactgctaaggctctaaggccagaataccccgtaataaacctattttttttcataccctatctctactcttattgtacgaattcaaagacaaacttgccaatagccacatcatcaccattaacagctcctttttcacgtagtgcgtcatcaacacctaaacgcttaagctttcttgctaaacgcataataccgtcttggtgatccaagttggtcatttgaactaatctttctaattgttcacccttaacgataaattcatgttcgccaacttgctcaactgtaaattcattcttttgtggtgcctgatacttatattctttaatcttttgtgctagcttaggttgttcttcagcctgttcttgttcaacttcagttactaagttggcagtatctgacatcaacttatctacgcctttatgagttacacttgagatctcataaataggttcattatttccttctgcttttaatgcttttttaaactcagctagtttttcctcagcaccaggaatatccatttgtgaagctacaatcaattctcgcttctttgataaatctgtttcgtaatttttgagttcttttttaatggtatggtaatcatcaattgcctcacgaccattattaggatccattgaaactagatgtagaattactttggttctttcaacgtgacgtaaaaattgaattcccaagcctacgccttgactagctccttcaattaatcctggcaaatccgccattgaaaagtcacgaccatctggcaagataaccattcccaaattaggagttaaagtcgtgaattgataagcagcaatttttggcttggccttagttgttactgataacagtgttgatttaccaactgacggaaaaccaactaagccgacatcagccaataattttaattctaagcgcaaaacgcgatcttcacctggttcaccattttcagcaatttctggtgcagtattaacactagttgcaaaatggatattaccgcgaccgccgcgaccacctttagcaacgactagttcttgacccttttcagttaaatcaccaatcaattcattagtgtcataatcatatacagtagtaccaactggaacttttaaataaagatccttagctgcacggccatattgtgatttaatacgaccattttcaccactatccgccttaaacttacgccgatagcgaaaatccatcaaagttcttaagccgctgtcagcaacaaaaataatactgccgccacggccaccatcaccaccggctggaccgccattagggacgtatttttcatggcggaaagccaccatgccatcgccgccttttccggcttgtacttcgattttagtttgatcaacaaatgtaggcatgtatatctcttccttccgtcttaatctagcttttaatactataccacagaaatacgcatgatatcgcgttttctcggattacaatgttaattttaccgtttgtgcttgagtaagcgttaatcctgctctacgcaagtcatcaattgaagcttctttaattttcttcaatgaaccaaattcgcgcaataatttgttacgacttttaggaccaattcccttaatcgaatctaaacgactggacaaagcatttttagcatggcgtcttctatgaaaagtaatcgcaaagcggtgcacttcgtcttgaacgcgcgtcattaaataaaagccctctgatttgggattaaggggaatcagtttcaaaggaataccgttgatgggatcgccaaataataaatggtttgttctgtgcttatcatctttaaccatccccgcaactgggatattcaaatttaattcatttcgtaaaacatctaaacaagcatcgacctgaatttgaccaccatccatcaaaatcaaatcaggcattcttttatgctcgcgcaacagtctaccatatcttcggcggacaacttccctcgtgttgcgtacttcgtcgccaccattttgatgttcaacctcaccttttagcttatatttacgataagctgttttttcgggttcaccatctttaaaaacgactaaagcagagactgggtcagcaccttgaatatgggagtgatcaaaactttcaataaagtgtccatatggtaagcctaaagcatcaaaaatttctttttgagcgcctttagtttttcgattacctagttctaataatctaaacttatcatctagctttaacttagcattatccttcgccatgtctagcaatgactttttctgccctcgttgcggtgttctaacaggtaccttcaaaacctcagctaaagtagcattatcaaatccttcaggaatcagaatttctttgggcaaaaccctatttctttgcccataaaattgcacaataaaggaagtgaaagcatcttctggatctgtggcatctgtcaaaggaaacattctggtttctctacgcaataactttgcttgccgtaaaaagaagatttgaacagaaatccaagacttgtcaacgtaataattaaaaatatcacgctgcgtattatcattggaaataattttttgtttttcaaccgtttcttcaatatatttcaattggtcgcgaatttcggctgctcgttcaaattcaagattgctagctgcttgagccattttttcggtcaaactctgcttaacactagcaatatctccattcaaaaagctcttgatctttttaatttgctcttcgtattctttttgtggcacttttttaaagcatgcacctaagcactgccccatatgatagtaaagacaaggtctgccttgataaccatgacagcgccttagtggaaaaactttttgaataaacttcaaagtggcctgggcagcatatacattaggatagggaccaaaatagtagccaccatccttatgaacgatactagttaaccgagtttgcggatcatgttcacgcgtgatttctatgtaaggatatcccgtaccctgctttaattgaacattataataaggttgatacttttttattaatgtaatttcaagtaaaaaagcttccttatcagttgatacagtaatgatgtcataatctcgaatttcacgaactaattcagcacgacgtccaacctgtttactcttaaaatatgagcgaacccgattttttaaatttttagatttaccaacatatataaccgtaccgttaatatctttcatcaaataacagccgggtttttctggtaaaagttttagtttattctcaattaattgtgttgccattatctcatctcactgaaaaaatttgcatttaatagtttaacacagactgtttaagaagatcttaactttgcttatagaaatagctattcggtacaaaagttgatatattaaaagaaataaaatttgaggagaacttttgatgactaatctagtttttgacttaattaaccaatttggctacctagccatcagtttgctaattgcaatcgaaaacatctttccccctattccatccgaagtaattctatcgttcgctggctttgcaacccatcattctcaaatgaatgtcttcggtgtaattattgcttcaacaatcggcgcggtagttggtgcactagttttatattggattggcactttacttaatccagatcgattagaaaagttgttcgatcataagttattcaaactacttggctttaaaaagggtgatgtacaaaaggctatcagatggtttgataaatacggtaccggtgcaatcttctatggtcgctgcatccctgtagttcgtagcttaatttcaattccagctggaatagccaaagttaaattacctaatttccttatttacactagcttaggcagcttactctggaatgctattctagttggtcttggttcctatatgggtgaaaattgggaacaaattgtgttaatttttgaagaatactcattaattattggaggacttattctaattgctttaatatatttttcctgtaaatggtataagcaaaaaattaaagctgattaattcaaacgctctataaaaaatatagagcgttttcttcttttaaaaattaaaaatatcatgtaaaattaatctaatctataataagggaagtttgcgaatgaaatttaatatttttaggaaacaaaatgttgagaactatctcggtaaagacattaagttctccaaaacaatgaacgccgttgatttaatgtctcttggcgtaggagctgtcatcgggaccggtattttcatcttacccggaactgttgcagccacattaactggacctggcgttagtttatcctttgttgttgcagcaattgtttgtgctttagctggaatgtgttatgcagaatttgcttcagcgatcccagtagctggttctgcctattcatatgggaatatcgtttatggcgaatttacaggctggattatcggttgggcactgattttggaatacatgctatctgtagccactgtggcagcaggttggtcatcatacttcagttctttcattgcaccatttggtctaaaaattccacacgctatttctggtcctatgaatcttaacaatggcgtttattttgacttggtttctgttttaatcattttacttatcagtatcctgttgtcacgagggatgaagaactcaattaaaattaatgtcgtagctgtttttattaaaatcgccattattttaatttttatttttgtaggcttacagttcattaaacctaacaactatcatccgttcttgccatatcatttttcaggagtcatcaaaggagcaaccacagtcttctttgcctttcttggctttgatgttgtttcatcatcagccgccgaggttaaaaatcctaagaaaaatatgcccctaggaattattggcactttagctattgcagctgtactttattttggcgtttcaatcgttttaacgggtatggttaattataccaagctaaacgtatctaatcccgttgcttttgcattgcaatatgttcatcaaaactgggtagcagagttattatcatttggtgctatgctaggaatggctaccatgatgctgacaatgatctattcaagctctcgcttaatctatgctatggcacgtgatgggctattgcctagtgcattcagtaaattagataaaaaacataactctcctcaaaatgccttagtcgctgtcactattattattgcagcaggtgcagcattcttctccgttgatcaactagccaatttggtcaactttggtacactttttgcctttactcttgtttcctttggaattctaaaattaagaaaaagaacagatattgttaacgatggctttaaagttcccggatacccatatttgccaatcatttctggtttaatttgtatctttatgatttgccatttaagttcagaagtttacttaatggcagctatttggttaatcatcggtgctgtaatttactttatttatggctaccaccatagtcagcttgatcatgattaacatcagtaaaaattatgtaaagaaaaagacgattcgcatgaatcgtcttttttagctctgtttgaactagttaatttgattaattgcctgaccatctttaaagaaagacaaaacattattcgcagcttctttagacaaattaaatctagcaatgtgagtagctgaaccaacgtgaggcgtcatgatcacattatccatttcaaccaattcaggtcttggatgcggttcgttttcgaaaacatctaaggcggcgcctgcaattgaaccattctttaacgcagcaattaatgcatccccgtcaatcaacgatccacgagcaacattaattaaaaacgctgtgtctttcattttctttaaaaagtctgaattaaccagatgatatgtttcagctgtagcaggagtatgtaaactcacaaaatcagcttcttttgccaaagtatctaagtcaacatatttagcatctaattctgctgcaatttgatcatctacttgatgacgattatgataaataattgtcataccaaatgctttagcgaacctagcaacttgttgaccaattcgacccatacctacaattcctaaggtctttccttcaatggagtacccttggttgtcgtactcatcggcatttaaaaagacgccttcacgcaaagcatcgtcataataatgcaatctacgagctgatgccataatcattgtccaggcaagttccgccgttggacgcaacacactcttagggcaatttgaaacaactattcctttttctttagcgtattcaacatcaacgtgatcaaagccaacgccataagttgaaattatttttaaatttttcgcagcatcaatcatttctcgatcaaaagccatctttgctacgatcacaccatcatattctgcaatatgatcaagcacccactcacgatcatcttctggtcgatgtcctactggaccgatatcaacttgacaaatattttttaaatcagttaaggcctcatctcttaagccacctaaaactaaaacttttgctttattcattatttttagacctctattcaattttcatcttaaagtaaaaataccactatttgaaagagaaaacatctactttaatattttattgattgcaactgcaacaccgtcgtggtcacaatcagccgtaacttcgtcagcatgttgctttgtatattcaacagcatttcccattgcgatacctaatccagcataagttaacatcggcatgtcgtttgcttgatcgcctagggccatcacattacttcgatctatttttaagtagtcacatagtcttttcaggccagtccccttatcgacaccggcagcggttgcttcataataaaaaggctcagtctttgaaaatacaactcgatctttcatcatttcaaataaaggagattctattttatcatctaaatagtctggatcatcaacatacatacatttgatgattggtatctgcttcatttcttcttgtgtacgatatgagacttctaattttacgacccgtgaattataaattgtataatgtcccaaatcacggctagctgtataaattcgatctaacgatacgctatgaaaatgtaagtttagctttcgcgcaattgtctctaaatctacataatcttcatattttagcccctgtttgaaaataacctgccccgcggttgattctacaactgcaccattaaaactaactacatactgattttcttggccattaagccctaattcatctaaataacgttgagtatctgacaaaggccgacctgtgcaaattacgatttgcttgccttgtttttgagcagtcaaaattgcttttttaactgctggtgtaatctccttcttagaattaactaaggttccatcaatatctatcgcgattagcttaatttcttccattaccttttcccttaaaacaaagaaagcaccgcttatgcgatgctcctattaaacagccatggtctgcgtattttcttttaacttgaccaaatcagccatatcatcagcactgatttcaaaatcgatgttcaagttttcctgcatttctttaacattatcactcttcggcaaaacaatacaacctagctgtaagtcaaatgctaacattaattgagctggactaacatgatacttttcagcgtaagtcctgattcttggatcctttaacaaacgaccatgtgcaagtggagaatatgctttaatctgaattcctaaatttttacattatttcatcaaatcagttggcacatttcctatatgaacttcgatttgattaactactggcttaattgagctgttattaacaatgttagctacgtcttcttgtaaaaaatttgaaacaccaattgatctaactttaccggctttaagtgcttcttccattgctctccagttttccagattgccttcaaagtgacgatcattaattctattcacttcaatccaaggttgtggtgaatgaattaacaacatatcaatatattccaaactaaatcgatctaaagcgtcatcaattgcttttttgtaccttcatagtctttaatcgaagttggtaatttagttgttaaaaaatatcactactctcaacatcagagttccaaataccttttcccacaccactttcattgccatagtctttagcagtgtcgaaagcgcggtaaccaacattaatcgcttgacgaattacttttcgtacatcatcgttattaattagccaagttcctagttgaattcgaggaacctctactccgttattgagcattaaagttttatcagagtacatatatacacctctacattttactaatatgtctctgtttcttaattcctgtatttgtatagctaataacaattattaaacaataattgtttttttcagccatctgttaatagagtacaacaaaattgttgcaaatcctatacatacattttattttttgtgattctgttatattttctaattaaaatagtagcatcaatcaatgctgctgggtttataaagattatcaaataatttattttattattctatacaaaattaatattttcgtataaaaaaagaaagggctgatgatgtcctatcaactctttctcttcagtctcttaattcccaacacctataataccagcatttatcatttaaacaaggataaaaaacatcttttacttacttttagttttcacattatagttttcatcacatgtttaaaaagcttagatgctatattacaaaatgattacaagagaaatatagatcatatagttcactattagctatatgcaaatactatattttttgagcaataagctgcaacaatttttgagcaatctttcgcttactcattttaggccatttcttagttgacttatttttttgtaaaatcgttacctggtcttcatcattgccaaaaacatttttagaaacgtcatttgctacaatcatatctgcaccttttgaagatagcttttttgcagcattttgtagcaaattattcgtttctgccgcaaagccgacaactatctgccctcgctgcttgtggctagcaacttcgcgtaaaatatctgtcgttttaactaaagttagagtcaaagtttgttgatcagcttgcttttttaatttatgatctgcaacttgtttcatgcgccaatccgctactgcagcagccataattaaaacgttactatgcttaaattcttttttgactgcaactaacatttcttcgctactagaaacatgaattaatgtaatcctaggattttgtggcaaaggcatacttacattaccatatattagctttacttttgctcccatcgctgctgcttctgtagctaaggaaatgcccattttcccactagagcggttaccaataaagcggacgggatcgattgcttcttcagtaccaccagcagtaataacaatattttttccttgcaaaacgttctgttgttcagtgaaatttttgatccacgccacaattgctcctggctctggcattcgtcctttagcagcatagccttctgccagcatccctactgcaggctccattatttctacaccatgttctttcagaaaagctatatttcgctgtgtagctggattattccacatttggtcattcatggctggtacaaccaatttaggtgcacttgtagctaaaattgtagtgctagctgcatcgtcagcaattcccgttgccattttagcaataaaatttgcagtcgctggtaaaaccagagctaactctgtccaacgcgctagatgaacatgtggtatgctagactgattttccttgctccataaatcatccaaaacaggatactttgttaaagcagccagtgtattagtagttacaaaatgctctgcatttttagtcattactatttgaacttgatgacccgctttttctaaatcgcggataacgttaactgccttataatcagcgattccacctgtcatataaattgttattcgactcattttaccattcctcgtcatctaaacttatttttattttatcattgtccacttaaatagtagaatattgtgttgggagttatatttggaggaaaaattgaaaaatatgcaaaaactacttttactaactatattcttacttagcttatcggcctgcactaaaccacaattatcctctgtaccacgtgataaaagtgccactacaatcaagattgttgataggaagcttgagttgcatcagcccactaaaaggccacttcaacctttaaatggaattttgcctcattggctgcaaatgccagataaatctctgcctaagccagcaatttatactaatttgaatactgttcttaaaaacaaatagggaaatgattagtttcatcttccctattttttgttcaatttacaagttgctttaaaaatagttgttttatattaatgagtaatttaaaatttatataatacagaaaggaactttatatatgccaaatttatccagtgatttaacttcaactattaatgagagactaaacaacttgaccgcatctaaaattcgagcatttgaccaaaaggtctctgaaatttctgggattattaagttaactattggtgaacctgatttagcaacacctgatcatattaaagatgccgcaattcgtgatattcaggctaatgattcccattatgctcctcaagctggtaagccagaactacttgaagctattagcaattaccttgaccgctcaattggtgtacattatgatcaaaaaagtgaaatctgtgtcactgtcggtgcaacaggtgcattaaatgatgtctttatgaccttgcttaaccccggtgacaaaattttggttcctactccggtttgggctttatactttcagctaattaaaatgactggagcaatccctattcaagtcgatactaaaaaagatgacttcatcttaacagctgaacatttacgtcatgttctcaatggtcgcggtaaaggtgcaaaggcaattattttaactgatccttctaatccaactggccgcgtttattctgccacagctctaaaaaccttagcagatgtcattaaggaatacaaaatcttttctgtaactgatgaaatttatgcagaacttgtttatggcaaagccaaacatcactcactttctgaatacatccctgacagaaatattttgatttccggtttatccaaggcttatgctatgactggctggcgtttaggctatattgctgcccctaaacaaattatgaagagcatccgcaagattaattcatttttagttacttcagttactgataacgttcaaatagctgctgtcgaagccttaaacaatggtcaaaacgatcctaaaaaagcacgcgaaatctacgaagcacgtttaaactttatgcaatctggcttagaaaagttgggctttgaaatggccacaccgcaaggagcattctacatttttgctaagatccccgaaaaatatggcaccaatgatgagcaattcgcttttgagctggctcaaaaagcaaaagtcggtgtcactcctggtcgctactttggcaagggcggtgaaggttatgtccgtctttcttatgcatcatcaactgagcaattaaaagaaagtttagctcggattagtgatttcgttaataatttataattcagataaaaaaataagtgatctcaatcaaagcgagatcacttattttttattatattgatttattacttatcccaagttgaattttctgcagcatcttcagcagccatcttttcaagacgctcttcagttgcctttacactgtcttggtacttttcctcaacttcgatccccaagtcagctaattgttgatcagctactggagctggagcatgcatcattggttctgaagcagaagcattcttagggaatgctgaaacgtcacgaatattatccttatcagcaagcatcattgcaaatcgatcaagaccgatagctaaacctgcgtgaggtgggaagcccatgtccaaagcatccatcaagtaaccaaattgttcatatgcacgtttcttagtgaaaccaagtgccttaaacatattttcttgaattgagcgcttgtggatacggattgagccaccgcccatctcatcaccattcataacaatatcataactacgtgcgtgagccttatgaggttcagtagttagcaacttaaccccttcatcatctggcatagtgaatgggtggtgagctgctacccaacggccaagtccttcatcgtattcaaataatggccaatcaacaacccaaacaaagtcataaacacccttaggaataataccagtttctttggcaaattcacgacgaaggtggtcaagtgaatcacaacataccttccacttatcagctacgaatactactaattcgccaccttcaagatcaaattccttcttcaaagcttctttgttctcatcagtcaagaagcgagcaacagggcctgaaaattcgccatcttcaaatttaacccaagccaaacctttagcgtggaatcgtttaataaagtcagccttcttgtcaatcttcttacgtgagtattcttttgcaccatttttaacagcaattcccttaacaaaaccgccatcagcaattgcaccggagaagaccttaaagtcactatccttgaaaattgggcttaagtcatgaatcaacataccgtaacgagtatctggtttgtcacagccatacttgttcattgaatcagtccaagtaattcgcttaattggagttttaagatcaatgcccttgacatctttcataattttcttcaaaagaccttcagtataactctgaatagtttcttcatcagcaaatgacatttccatatcaatttgagtaaattctggttggcggtcaccacgtaggtcttcatcacggaaacaacgagctaactggtaatacttgtcaaatcctgcacccattaaaagctgcttgaacagttgtggtgattgtggcaaagcgtagaaactacctggatagattcttgatggtactaagtagtcacgtgcaccttcaggtgatgacttacctaagattggagtttcaatatcaataaaaccattttcatcaaagaattcatgagtagcacgcaaaatctttgaacgtaaaataattgcttgttgaacttctggacggcgaagatcaagatagcgatactttaatctagtttgttctgagacttcaattccatctttaatttcaaatggagggttcttagccttgtttaaaataatgatttcagttgcatcaacttcaacttgaccagtcttcatgtcagggttaacttctgaacgcttaacaactttccccttaacttgaacaacatattcattaccaagtgaatcggcaatatccattaacttcttaccagaatctttgttaacaacgatctgaaccaagccttcacggtcacgcaaatcgatgaaaaccaagttacctaagttacgtacacgttgtacccaaccatagagatttacatcttgaccgatgtatttttcagtaatattgccacaataatctgttcttttttcgatcttttccattgttactagtccttcaattcatccattattttagtcatgttatttagatcttcaagacttaaatcgattgtcttgccatcagctaaacgtttaatattcaaaacgccgttagccagttccttttcacctaaagtaataacatacttagcaccttcacgatctgccttcttgaattggttctttaacttcttctgattgacatcaaagtcagcttcaaaaccttgattacgaaggctacgtgcaatttcaattgccttttgtgcagtaccgtcaccaatattagtaataaagaaatcaataccgcgtttctcgaataatgcaggattttgctttttaagcaccaacatcaatctttcttcgccaatcccgaaaccaacggctggagtagcgggtccattgaattcttctaccaagtgatcatatctaccaccaccaagaatagtagttgcactttcccataagctcttatcttcaaccataaattcaaagataattccagtatagtaatcaagtccacgtactagatcatcatcaattacataatcaataccaagttgatctagcatcttcaagattgcttcaaaattagcttttgaatcgtcatccaaaaattcacgaatcttaggtgccttaggcaagaacttcttatcacgttcatctttagaatctaaaatacgcaatggattatcacgcaatcttctttgtgagtcttctgataactcatctttcaaaggagtgaaataattaaccaaagcatcatgataatcttgacgtacttgctcattccccaaagtgttaatgtgaagttggtaattcttaacgcctaactcacccaataaatcatgtcccatcatgattgtttgtacatcacttaatgggttgcttgagccaaagctctctaccccaatttggtgaaattcacgttgacgaccggcttgtggtctttcatatctaaaagttgattccatataaaaaacattaaatggcttaacaacttctggcgcatacatcttgtcttctacataagcccgcactacgctagctgttccttctgggcgaagggcaatatggcgaccacccttatcatcgaagtcgtacatctgtttttcaacgatttctgaactatcgccacttgaacgagcaaagatttcataattttcaaaacttggtgtgcgaatttcacgataatttgcgcgattgaagaaatttctggcagtttcttcaactttttgccatgaaccagattgatcaggcaaaatatcaactgttcccttaggtttttgaactctcatttaatcatcctttttatattttgataacttgattaaaaataaaaagcgcccttgaacttaatcaagggcgcttagattagcacggtaccacctttttggttgctgcgattaacgctcgccaaacgatccattatctgttaaaggtgtcacagaccgcgatctatctactctctcaccacaacgagcagtctctttgaatagatcattgctaatctacattctttgtcatcgataattcttacttagcttatatttttctcaagacattgtcaacctttgcggtctcattttttcgctaaagatctaacacaatcgtgaatggaccatcgttttctaaactaacttgcatgtcagccccaaactcaccagtctcaacgtggaaaccgtcattttctagttcttgattaaagtcttcccaaagttctttcgatcttggtggacgcatcgcatcaacaaaactaggacggttgccttttttagtatttgccatcaacgtaaattgtgataccgacaaaatttctccgttaacatcctttaaagacaagttagtcttcccctcctcatcttcaaaaatacgcattttagctattttatcagctgcttttttgattactggcaattcatcaccatttttgatgccaactaataataaaaagcctttaccaatcttgcccacagttttaccgtcaatatctacttgagcatgatttactctctgaattacaactcgcattaattatctgacctcttagtttcgtatacgtctggaatatcacgtaatttactcaaaatttcatctagttgatctgcattccgtacagcaactgtgacatacatatgtgcaacattatcttcgtttactttaccagaaatattattaatattcttagtaagtgaattcaacttattaataacgtcactaagcagattggaacgattgtaaccaaagacttcaatatttgcattaaaggattgaacactattttcctcaacattttcccattcaacatcaattaagcgaccttgttcttcagcttctttggtgatattacggcaatctgttcggtgaatagttacaccgcgacctttagttacatacccaataatcttgtcacctggaactggattacaacacttagctaaatgaagcattaagtcactaacgccttggatcatgacgccatttttatgcttaaccttcattgtagtatttgaattcttcttaggttgttcttcttgaactgcttgttgtccagaattcaaaatcttttcttccagctctttttgtttttgattttcttcctcacggcgcaaatcaaccgtcaagcgattaaccactgcttgagcagaaagatcaccaaagcctactgccgcatatagttcatctgcagtgtgataattaaagtgctctaatagcttttcaattcgatccctggccataaattctttgggtgaaagatcctcatcgcgcaacatatcagcaatcaattgttcaccatgctggatgctatcttctctatcctgacttctgaagtagcgtctaatcttgttgcgtgctcttgaagtcttcaccatgtcaacccagtcacgcgatggcgctgcattagtctgtgtcataatttcaataacatcgccattgcgtaatttatagtccaaaggaactaatttgttattaactttggcacctactgcatgactaccaacttgagtgtgaattgcataggcaaaatctagcgtaaccgaacctttaggtagttcatatacttcacctttaggcgtaaaaacataaactctgtctgaaaaaatatcacttttaacagacttcataaattcaccggcatctttagtttcatcctttaattcaaggatttctcttaccatatccagcttttcaccagaggtactttgctcaacaccagtaaaattgccacgcttataagcccagtgtgcagccacaccatattcagctactttatgcatttgttcagttctaatctgaatttctagtggacgaccgccaggcccaataatggttgtatggagtgattgatagccgttaacctttggcatagcaatgtaatccttaaaacgacctggcattggcttccattcagtatgaacagcacccaaaacagcataacaatcacgcacatttttaacaattacacgtacagccaataagtcataaatctcatcaaaatctttatgcttattaaccatctttttatagattgaataaatatgcttcggacgaccataaatttcatatttaatgcctaattcatttagagtcttcttcaaagtcttgattgtatcggcaatatatttttcacgctggcttcgcttgacatccatcaagttaacaatgcggtaataggcttcgggatttaagtagtggaaagacatatcttctagttcccacttaattgtcccaatacctagacgatcagccagcggtgcataaatatccattgtttcggaagcaatacgccgctgcttatcaggtcgtaagtgttgcagagtatgcatattgtgtaaacggtcggctaacttcaccataattacacgtagatcttgagccatggcaatcaacattttacggtgattctcagctaaaaattcttgatgagacttgtactcatatttgtttaacttggttacaccatcaacaataaaagctacatcttcaccaaatttttccttcagctcatcatttgtaactggggtatcttccactgtatcgtgcaaaaagcccgctgcaactgtatcaggatctaagcctaatgtagctaaagttccagccacttgcgttggatgaataatataaggttgtccagacgcccgtttctgtccagcatgagctttattggcaaattcatatgctttttcaacaaaggccacctggtcatcattcatatactttttgcaggtatcaattacctgatcatgcgtcatttcaatgtatttggacattatgatcatcccctctagcggtaaatatttttattcattaagccaaaagcttcaattattaagtaaattaaaccaaacattaaattatacaaagcaaaatgtggcaacattgctaagcagaaaagcacaggtaacaagaaaattcaccacttggacaggttaagtttaataattaaattgcctagatggtatgcaatgatgctgttaataataaaaaacagaattgcttctcgccacactaccggcacacggcaaatgctaaagatatacggcaaaatcattaccaaaatactccaccagacaagtgacatccagcgatgagaattcaacttcctgacaattggaattgcttcgattttatttcctagttttttcattaaaagattgtgcctctcatcaaagtttaatttaattgataatattttaccatatttatttttcttttctagtaattgctagtcccatccagcgaccttgacgcatggttaaatcgaccttaaagccattctcgtctagagccttttcaatcttaggcaattgcaggtagtcaattccagaaaagataacttgaccatcgtcgtttaaatgactatccatttgtggaatcaagtctagtaaaatttctgccaaaatattggcaacaatgatgtcaaacttgcctttaacatcagctaacaaactagtcttttgagtgtgaatattattaatatcgtttaaggctgcattttgtttagctgcagtcattgattcatctgaaatatctgtggctaaaacatcagttgctcctaattttgatgcagcaattgccaaaataccggaccctgtaccaacgtccactacattcattggcttaaccattgctctctctaggcccatcattgctaattgagtagttttgtgatttcctgtaccaaaagctaagcctggatcaagcttaattaattgctggtccttaaaagcgggtttgtaatcttcccattcaggcacaattgccaagtgacgtgaaaaatcaatcacgtgataatacttttgccatgccgtgttccaatcttggtccttaatgtatgaagttgtaattttggcatcccctacatctaggccatagctcttcaattcctttaacttatcttggaatttttttactaatgcgtctttatctgcttcttcatcaaaataagcatagaaatatgtatccttaggtaagtctttaatgtcatccatttcaactacagtagaatcatgcaaccagcctgcttgctcaaagtcgctacgctttcttgattcaatacccaatgcattcagattatctaaagcaaaaacgctcaaagcgtcttcaacttcatgactagtatcaattttaataattagtaatttcattagtattatctcctttgggattttctttgcataatgctatcatgataacaggtgataaatatgtcaaagaagaaaaataaaaagaacaaactcgaaaaaacattggtcgaaaaaatcttagaccaaaataagatcaagtatcgtcaagctcaatttgctgtctccgaagataaaggcggagttgcacaaatgaacacttctattttagaagacaaagagcgtttagtctataaaactctcgtctgcgaaggaaataaaactggtccattggttggtgttgtaccagttactgaacatttaagcatgaaaaagttagctaaagtttctggtaacaaaaaatgtgaaatgcttcccttaaagaaattagccaaaacaactggttatgtacatggcgctaatactcctatcggaatttattttaaggaaaaatttcctatctatttggatgattctatgcaaggaaatcctgaaattggtgtttctagtggtgaagttggccggagtgtctttttgaacccagaagacttagccaaattctgccatgctccttttgttgatctaaaagaataaaaagcgcttacaatttattgcgttattcttcttcttttgtgttatattaaataatgtaccgcatacagaatataacaattacatagaagaagatgacaaaaatgaatttattgttaggaattgttggctttgtagttgccatgatcgctgcctttgttgttacggcattagcaattgccaagtaaataaagcaaaaaaataataacagatttaaaatgacgtggtttgatatcatgccattttttatttttttatataatagttatttattatcaaattataagtatttaatatataaggctaaactatttatactaaaaagaaaagtcttgcctataaaaaaagttgaatttatatcagcaatgttatttatttgtgctaatctaaatatgttgtcaaatgtaaaaagaacacattgataataaattgtaaaagactcagtcttttacgttcccaaaagaaggtttagataaatgaaacacaaaaatgatttgagcttcaatgcaaaatttaatggaaaacaaaaatttggttttagaaagttgtctgttggtttagctgcagttgcacttagcactacttttttcttaagtaatagtcaacttgttcatgcggatactaatactgcgactaatgaagaacaaactcaacaagattcacaaaaatctaatcaagaacagtcaaataataccatccagtcgactcaagctgatccaagtaaccaaaataatcaaagttcaactaaaaattcaccaaaccaagaaaaaacaaaacaacaaacagtcgaaattaccgctttttatacagatgaaaaaggtaataacgcttctgaaataaaaaaagatgaatcagcttctttaatggctggtcaagataccatcaatgttgacattaaaatcaaccagcctaaattagatcaaaataattctttaactattaacttgccagatactggagaaagtaaaaactatcaaattaatactggaaaaacaaagattttcagtaataatgccggtagtcaatcttactgggatattacggcagtcgatcataatgacaatagtcaacttgttgccgtttagaataattcgattagcaaagattcacccgactaccttgatttaaccatcccagctcttgctaatggatccacagttaaatcagatttaaaaaatcaggctttcaatgtagaaattgatggaaaaagccaaatcgccttcacagctgatttaacaccttacaaggataaagttaccccccaactgaattgatccatggctttgctatgggacaaaagtcattcaacggttctgatgatggtaaagtatacccagagaaaaacaatatctcagaagaagatattaaccaattaaaattaaacgatgacagtcacctgcttcaatggggaatctatttcaattatggtaatcaattaaataatcctcccctttccttgtataatgcaatatttaaagttgcttttagtcaagatcaaactttaattccttcttcaatcaaagtcttcgagattccaagtggaatgtccgtggatcaaaatgcattacggcacggaattaaggatttttacgatggagctgataagtccgatgaaaattactacagcataattgctactggaaataatgaaaagacaaaatttgcggactttttgcgtgctcatttagttaaaaatgcaactggacaagctactggtttctcagtaaaccaaactggtcaaaaattcaatcctaatgatcctagttatgactacagtacccatgcatacttcattcaattagatactgtactaagtaataaatctggccaaccaactagtagtactggcatgacctctgatacatcaaaaaatactttagctggtcaagggcttagtgctgattacaaaaataaagacgaccaatcagctaatacccctattcaatttagcaggttagaagaagcattagctttatttaaaaataagcactataaaattgaaaaagtttctggcgccaatgccacattaaaaacggacagcagtatcggctttggcaacttttataataatgaaaatgtagatcaacacttcatcatttacttagttcatgaaacgcagatagaaaagcaaactgctacagttggggaagaagtaaaaggctactatgtaaacggtcctaagagccaaaacttttccggtataaataatccagatgtggctgttcctaaaaatgatgaaacacctactccaaatgtagtaaaagaagttatttactctagaagcagggtggttgatttagttaaggatccgcaaggcacagaaacaaactggtcacaatggatatcaaacaatcaagcattttcagctattccgtataacaatactacaattaaagacataattgatggccattatcatttagataaaaatggcgtgattcacattgcttcttcacagaataaacttactgctacaagcaattcaattactgagatttccgcaattgcacctaattcggagtttttagcttcaattgcttctaccacagttaatggtcaaaaaacaacaactggcaatctagcaactattagcatttgggtaccctatagttactccgcttctaaaccggaaccaaccccaactcctattcctatacctgaatctgagactccgactactccagaacaaccgaagcagccttctgagccgaatacaccatatgagtctgaaccacctaagtctatgaatacaaacagacaaagattcacaaaaaagtaaattggaattctagcagtcatccttatggcactgatatgcaaagacagaagcaacacaaagatggaattattccaccccatggaactgccattaataatattccaaattcaacaacaaagactagaactactaataatatcgttaagtcttacaataatattagttctaaattaccacaaactagtcaaaataattctaacctgagcttaatcggtctagctttagcaacactaggactactgggatttactattacaaaaagaaaacatgattaattaacaatcgcaaactaaaagagacagaccaaaaatctgtctcttttttctaccttaatttatttaatctgcatgtctccacttcttatcagttaagatacgtgcagctaaaagacctaatggcaaggccacgacaatcatcaacgcttctacgatccaataagccccgatattaatattcgtgattccaaagttaaatacagctcgatacatgtaaagaccaggcaccataattacaattgatggaacagtaattgcaattcttggaaaaccaacttttttccttacaatacttgctaatagaccagctgttaaagcaccaataaatgctgccaaagctggagcaacctgagcataatcgactaagctaagacgtaatgtatttgccattgctcccattaccgcggctgtagctgccatttgtggtcgactgttaaacataattgaaaaaccaaacaccccacaaaagctagccagcaatcgcaagcaggttaacgtccctggatcaatttttaacttaggcatagatcctggatgcaaacgcaaaattgttgctacagcccagcctgccatcgttgcaattacgataattaaaatcgcataagtgagccgttcaagcccagagcgcatatctaacttagacatgtccaatccagatgtaataaatggaaaacccggaattacgaacaacatggcaccaatatagccataggcatgatcatgattaatgtggaataatatttctcctacatgaaaactcataaagtaaacactgcaggctatggcaaccgcaaccgcaatcttggctaccaaagttaacctgtgcttacccataattgctctaatatattgaccgcaagctgcacccaaaaaagcacagatcacctcaggaagaccgccgcctaataagaaaataaagccgccgcaggccaagcctgaactaagtcccgaaattaacggagaatacgctgacttttgctgagaaatctcccgtaagcgtttatgaatttgaccgatagtccattccccatgtcccttttcaaattgccgaacgaatttttccatttcattcaacttagtcatattcacacctgttgctggtaacgataaagtctgggaatatgattcattatcaacatcaaaacaggtatattcaattgacactaatccaatatccgttgaacaggtaatgcccaaggttctggcaaccgtatccattgaatcacgtactcgccaagcacctgtaccacagcttaaaagcataatacctactcgacctacaatcgaggtcttttcaactaatgttgcatcctgcgccatcgtattattatcgctcttgaaaaattcctcccacagaatcttcatatgatgtttttctgataaatgatgttctcgatcaatttcactcatgctattattacttttcctcacatagttcgcataattataactattatattctaccacaggaatttcatcataatttttgatattttaaaatttgctgcttctttttattattttaaatttataatagacatataagttattttgaaataaaggatgatttaaagtggctcaattaactgatgaacaacttgctaacattgctcatgacttttaccttagtcagcttaatattgctgatatctcacaaaaatatgatttatcgcgatatttaatcgctaaagcactagaagacgcgcgtaaccgtggaattgttaaaattaaaatctcgcgtggaatcaaacgcaatcaggtactagagagagaatttcagaaaagattcagattaaaagaagcttttattgtcgaaactaccggcaaccgcgatgaaaatagtgaagccgtagttaacttcgctgctaaacaaattgaaacctatctaaagcaagcaaaaatcgctggtattagttggggtgcaacaatgcatggcgtgatcaacgacttttttgagcaggacttagagcaactttactttattcaattacttggtcaaccaattaattctaaccgcaggaagaatccattggcccaagatgcggcagaaaaattgcattcccatagtctaagtctgccaaccccactttatatactaaatccaaagatcatgcctgccttgaaacatgagccttattttaaagtaattgaaaattgttatcatcacttagacatgcttttcactggtcttagtactttccaatcatttcaagctaatcaatttttgaaagaaaattatggacctgaactatttaaagacattcctgactgcgatgtagctggaatgatcatgggacgaccatataatattaaaggtgaatttttccctgacttcgaacaacacatttgtggtatcagcatgaatgacattatgaaaacgccaattcgtttttgtgtcgtccgcaatcgctttaaatctgaggcactccttggcgccttacgtagcggtatcattactcatctagtaactaatgatgcaattgcccaacgcgttttgcaaaatatcgattaattcgctaaagtaatacagagatagactatttataatgaggagaaaaaatgaaaaaatctaaatatgatttatggattggtgcactgaacctgatcaattgtgtgttattcattagctcttggtttgccatccttggagctgacttcactgctagaatagctttaatattttacttatttgcctggttcggcgtgatccttaatgccgttgcagtagtgcaatcgcataacatgaatatctcactaattgggccaattttaggagtaattggtaatgcactatatggctttaccgctgctctagccttacctgctgtgattgttaatattatttctgccttctttatctttatgcaacatagcaataaaaaatagaaaaaacagccaaaaattggctgctttttctatgctaaaatctgttatgtactggtcaacaattactaaagtggatttacaatgactgggaggtgagaattatggagtttagaattgacgaatgtattccagatgttgtatcaatgatggctttagcacaagcaattgcaaattttgacctcaatggtaaaaagccacaagatgtgaacctaggaaggatggcaaatgtctaaagtttttcgaaatgacttaaaaataaaggacatccctaatcaaagaaaacttagggatgtctttttttagcctaaatatgaaattgctacttgtaattgtgccagcttcattgccgcctgagccacattcttgcgatcaacatcaacaaaaatctcacagtgtttttcatcaaattcataacctgaccctagcgcaatatcttccgcagtttcatataactctttatcttcttcattaggatctagcttaaatagaattcgtccgccatcactaacgcggcaatgatcatcggcttcctcaacccaaacatatacggtatcgccataagaatcaatcatcattgtggcaatctgcaatgtcctatcgtcaacccaaattgtcttggttaccttagcaacatacgaacctatttcatggttaattttctttaattcatcctgcttcattttttacctctaatttataaattcttttctttaatataaggataccctcttagtaattcttctacaaatttattaaatagattgaatctcccaatcagcttgactgttaccgcttactaattataccttgtaaatatactaaattttggagaaaaatatgcatactaagggtttatcagttaaaaatgttgtagcgatcggaattggatcggcaatctatgttattttagcacgtttcacatcgattcctacgcctattcctaacacaaatattgaattagtctttccttttttggctctttttgcgtcaatctatggcgctaaggtcggttttattgtcggctttattggacatgctttgtccgatttcattatgtacgggcagacttggtggagctgggtattagctactgctgttttaggctggatcatcggtttagcggccaaacgcttagacttaaaaaatggtatttttggtattaaacaaataatcttttttaatatcattcaaattattgccaatattctcgcctggattgtagttgcaccaatcggtgacattatcatctatagcgaacctgctaacaaagtttttgtccaaggaatttcggctacgctttctaatggtattacaattatggtcattggcacgctcctacttaaagcttatgctggaaccaagattaaaaaaggcagcttgcgcaaggaggattaaacaatgcctaaaacaattattgaattcaaagatttttcatttaagtatgacagtcaggccgagccaacactaaaacagattaatctaactatcaaacaaggtgaaaaattgttaattgctggaccatcaggttcaggtaaatcgaccattggccgctgtattaacggcctaattcctaatctagatactggtgagatcaccggtgaatgcactattaacggcaagaatattaaagacactaacctatttgatctttctttcaccacctcaactatcctacaagatactgacagtcaatttatcggcttaactgttggtgaagacattgcttttgctttggaaaacgactgccaaccacaaaatcatatgaaacaagttgttcatcgctgggctgatgaattagggattgagcatttattaaagcaggcgccacaaaatctatctggtggtcaaaaacaaattgttgctctagctggtgtcatggttgatgaatcaccaattttactttttgacgagccacttgctaatttagacccagcttcaggaatgaaaacgatggctttaattgatcgcattcaaaaagaattaagtgcgacagtaatcattattgaacaccgtctagaagaagttttgagtcagcctatagatcgcattatcctaattaatgatggtgaaattgtagctgataagaagccaaatgatctattacatgagaattgtttagaagacgttggtgttcgtagtcctctttatttaaatgccttaaaaaaagctaacgtcgaccttacgcgtattcccgacctaacttcagtcgctgctttgccccaagatcctgaaattgctaagcagttgcaagaatggcaaaacaacattaccctaagtggtgaaaaagaagagactcatcctttattagaactcaaaggcgtcggccaccgttatagtaaattgcagattcatcctttacatgacgttacagcgacaatcaatcaaggcgattttgtttcaatagttggtcaaaatggtgcgggaaaaaccaccctttgtcgaattatttgtggctttatcgacaatgagggacttattttatttgatggtgataaccttaagcagttttcaatcaaagagcgttccgataagattggttatgtcatgcaagatcctaaccagatgatttcacaaaaaatgatttttgacgaagtagctctaggcttgcgtctacgtggttatgatgagcagactattcgcactaaggtctatgatactttgaaagtttgtggtctttatccgtaccgcaactggccaatctctgctttatccttcggtcagaaaaagcgagtcacaattgctgcaattttagtgcttaatcctgagttattaattcttgatgaaccaactgcagggcaagattggcaaacttatactgagatcatgaactttttaaaacagcttaatgatcaaggcaaaacaattatgattatcactcacgatatgtacttgctgatggaatacactaacagatccctggcttttgctgatggaacactaattgctgacacagatccaatcaagttattaactgaaaaagctttaattaaaaaggctgctttgaagcgaacctccttatataatctcgctatcaaatatcaattagaaaattcagatagctttgtccgcgcctatattgatgcagaaagggatgaaaaacatgcataatgaaagccaagttttaggttatcaacctggtgattcttttatttatcaattaaacgcaaccactaagttagtttttatactcctagtctcggttgcttgtatggtaacttatgataccagattcttaattgctatctgtattttatcaattttcttgtttaaagaggcaaaaattaagtggagccagatttcttttatcgtgaaatttattgtagttttcatgttgctaaatctgatttttgttttcatctttcagccaagctatggtgaaaatatttatcattctaaaagcatcttgatccatgccggctacttcacattaacattgcaagaggtattctacttattcaatcttttcttaaaatatgtctgctcaattccaatcgtattgctgtttctattaactactaatcctagtcaatttgctgcttcattaaataaaatcggcattagttacaaaatttcctatgctgtttctctagctctacgctacatcccagatatccaaaattcttattgggatatctcagctgctcaacaagcacgtggcaatgaactatccaaaaaggctagtttaggcaaacgaattaaggggacattgaatatcgtgatgcctcttatcttctccagtttggatcgaatcgatacaatttcaacagccatacaattacgccgctttggctcaaagaaaaaacggacctggtatgtcacccaatcatttaaaaaagctgattatcttgtaatgatcgtagccgtgattttggtattaattgtggttggtctctggcaacttgatcatggtagattttataatccatttatttagactaaaattaaaaggacctaatggtcccttttttgttttcgatttttctgtttatgatcatcttgagtgacaatctcaggtttcttaggaatcggcggcgtgattatttcataattacgcaaacggtgttcaagatagtcatctaatcgctcttgcgtattttcatgtacaataatcattaaatcacctcacttttcataattatacctcaaaaatgtaggttaaacagcgtaattactaagtatgccattccactagcaatcacaggacctgcagctacacccttgaaaaccactactccaataatagtacctaaaactaatgcaaccgtcacctgtggcaccgctgctaattgatcaacaccataacgtgacaagatagctacagcaattcccgctaaaatggcaatccatccagctggcgacttaaaagttttaatcagatccttaaagccaatctgtcctgtcgcaataggaactagaattgcaaccgaaataatagttacgccccaattaatcccctttgcttgaatagtaggcagccatttactagtaaacggtaataatttaaacaccattaccactcccgttgcaataattaatgacatgtttttacccactaacgctacaactagcaccaatgctagaaataaccaactttccatatttatctcccctcaaaaaatcattagcattagttcactttaacaaaaatattcatcaaaacaaaataatgagtctaaataagtgaaaatcaatctaatttgtgtcataataaaattactcagaaaaatatatgtatacgcgcacctcgttcttaaaacgaggtgttttttacgcaaagaaccagtgcagatattttaccttcactagttcttcttagttgatcgatattgcgatatgactttactactgcatcgtagttagaatttgcaaatatttatgcttgaaaataaaatatttgcacaaataattaaaaaacgtttcttgcaaaaatacaactaaacattttaataaaaacaaaaagatgccactttcgtgacacctttgtgattacttattcatacatttcgttttgaactaatccctaacttccttaatggtatcaatgatagtaccatcacgatactcaactaaggcaaccgtacgatcagtatattcaagtggctttggtacaccaacttgtttttcagcaattttttgcaattcattaatatccaagatcttaagtcctggcaccttactaaaggcatccactaaatcctggcgagctggattaatggcaattcctctttcagttactaaaacatcaattgatgaacctggagtaacaatagtttctactcttggaacaacagtcgcattacgtccccgaacaagaggagctgtaataatcgtcatcttggcaccagctgcggaatcttggtgaccaccgacggctccacgaatgacaccatctgagccagtcataacattaacattgaagtcaatatcgatttgtaaagctgacaagattgaaacatccaagttgttaaccactgcacccttattatgaggatcagcataccaagaagcatcaatttcttgttgatttttattgttagccattgattgggcagcacccttatcaaagtcctgcacatccataacttttctgactagaccttcttcaagtaagtcagtggtaggtttagtaataccacccaaagcaaatgatgcagtaatgccatcatcaatcatactttgacgtaagtacctggtgacagctaatgcagcaccaccagaaccagtttggaagctaaacccttgcttgtaatatggagagttaatgattacctggttaaccatttgagcaatcttgagttccttaggatccttggtaaagcgagtggcaccagaaccaatcttgtctggatctccgactttatcaattttaaccacataatccacttgatcttgctgaattgacgcaggcgtatttggataatcaacaatattatcagttaataaaacaaccttattagcatagcgagcatccattagggcatagcccaatgagccgaagacagcatccccatcttgaccgttagcattacctgcgggatcagatactggcacacccaagaaggcaacatcaaccttaatctcgccttcttcaattgaacgagcacgattaccatgtgagcggaaaattacaggattcttcaagccgccatgtgaaacaaaatcacctagtgaaccgcgcatacccgaagaagtaatattagtgattactccctttttaatcgcttcgataactttatcattcataacaccagtaagtgaacttggagccaaggttaaatcctggtaacccatactaataatcttgtccattaccaagttaaaaacataatccccatttctaaaatggtggtggaatgaaatagtcataccatctttcaggttattcttgattacctcatcaagtgaatcaataatcttattttgtccagtagtaactcttacctttggagcaacccgcttaacttcaggatgaccaatttcagtagtttcaaatggtttcaaattcatttttttcattaaatcatctggtaattcgcgttttactttattctccaatgtagttaccttctttatcaatcaagttagaagctttcgctgtttccaaaaccctggtagccttttctacaactggcttatcgatcatcttaccattaagtgaaataacgcctgagcccttagctttggcttcacgaatggaattttcaacattcttagcttgctcaatctcttctttagttggattaaagaccttattaaccatttgaatttgacgtgggttaaccaaactcttgccatcataccctagttcatggatatagttagtttcacgatagaagccttcagtatccttcatatttgagaacaccgtatcaaaggcatatacgtctgcggcccgagctgcttgtaaaaccatgttacgcgcaaattccaattcgcgaccatctggataacgatgagtatgcatatctgcagtatagtcttcgccagataccgccaagcccatcattaaaggcgttgcggttgcaatttctggggcatttaagacacccttggctgattcgatggcagccatcacgccaatagaaccattttcaatgtcaaattcatcttcccaatgttcgatatcctttaccaatttttgaatcattgcagctgattcagttttaggcaagcgaataacgtcaacgccggcttttaccattgccttaacatcttcatcgtaaaatggcgtggcttgaccattaacacgaactacaatttcactgccaccgaaatcgactgtcttaattgcctcataaaccaacattctggcagcatctttttccgttaatgaaactgagtcttccaaatcaagcataatcgaatctgcaccataaatgccagcatccttaatcatagctggattattaccaggtacaaacatcatggttctacgcaaacgattcttaacgtatggcatttagagcacctccaaatctggcttgtctgaagtttcggttgcacgttgtgcagctgctaaagtacgagccttaattacacaatccagtgctcccttatcggttgctttaaccttggcattttctaagccataagcttttaaggtgtcagtaatcaccttttcaatctgatctccataggccttttttacttctgattcaaggtcaatctcaatgccgttagaaccctttgaaatcatgatttggatatctgaactctcaagtgttcccgcaactgctgtggttttaatttccatcaatattcattcctttctcaattttagactgcaatttctgcatgttttgcttaataaattcataagtcgtttccggcacgaatttattgatctcttttaaattgccatccttgatcagctgtctaactttagtggcagtaataatttgaccgtctttttccaagcgatcaattacgattacttcaatctcaggaccaagctcatgcgctaggctaacattataaaagtgagtcgttcttgaaattggttctttaccaatataacgacgggtaatgttcagtcctggtgcaatttgattcttaaagacagctgcgtctatcaccgtttgtacagcaattaaatcgtcaggtgattttaagaagtatgctggaaaagtagctggtgaaaccatgtagtctccgccagagattactttcacattactaaactccttagtaccttcttgcaccaatttgaagcgctcatcaaagctaaacaaagaaacatcattagccacaacaaagacataaaccaaatcgttttcttcactagccatcttaatcaaatgttgatgacccaaggtaaacggatttgcattcatgactattgcagcgaccttcttatgctcttgatctgctatttcgggcacttcagccacaaaatccttcacatcaggcgttccattttctaaaaaggctgcctgatccgtcttggctaacaaattgaagtgcaagtgctcaaagctagttgcatactttgctttagtaaagacaaaggaatggaaaattccatcattagtcaaatattgcgttaaggctgtaaccgctttattaaagcgagccccctgcgtatcggcatcattcttgactccgatatactttaagacattaccagccacactaccagtaccaactaaattgccttcctcatcttctagcccaatagtatgatcaatcacgttaacttcgcgttcactaaaatcatttaaccccaatgattccaacaagttttcccatttttgcctagttgtagcgtcgtttaaaaacaaatcaacgactttatccataaatatgccgccttactatttcggtaatcgttttcacaaatatagtttactctcttagtttgattatttcaatttatctattaattttttgaatttttcaaaaattcagcaataatctcatgcgttttttctggttgctcagcctgaggcaaatgcccacattccggtacaatcgccgtttgaacatcttgattcagcatttttatcgcttgagtaaattctggattaaaaaatggcgatttttccccagcaattaccagcatgggaaccggcgtatccaaaatcatgtcacgccaatcttgctccgcatgttcaactaaacagttatagttttcggctggatcatatgggaattcttgatattcttttttagcagccaaaaacattttttcatcaatgtgatggtaacaagccttgccaaaatcaaatttaagcatgtcaggataattatcccaagttaggtctttaaagccatacttccagctcttatccgcaatcatctttggtgactggtctaaatcaaccattgcctttagtctacctttgccataaattgacaaatatgcccaaatattggcagcccccatggaatttccaatagctactacatcatgcaaattgagcttaactaatagctcctctaagtcaactgcatgacgactaatccgctgtccacgataggttcgttcggactgtccttgattgcgtggatcaagcataataaaacgataatcatttttaaataaggcaattaaatcttgccacatttgacaagatccccctatacctgggatcccaatcaaagcaggcttatcttcatcccccgtatcggtataatgcaaaattacatcgtcattagttttaaatttcatctttaatcttctttcattttgattactcaattctattatgacgcaaaaaaagcaacctggtgattccagattgcttattttttaccataaaccaataatcttcatccaaagaactccgacagttccaaaaataatcatatagattaatccaaggacaaaattcatcttccaccattcaccttgtttaacatagccagtagtagccaaaattgaggcaggaccattagcatagtgagtggttgatgcgttgattgcaccagtaaaggctaaaagcattgcggaaaggcctaaaggagcaccagttgcaaccgcaacagacaagaatggcaaataaagagcagtcatatgtgcagttccacttgcaaagaagtagtgggtgtagaacaaaagcaaaactagaattgccaatacaaagccccagctaacaccatgaagaccattttgaactaatttggagaaccaatcaataaatccgtatgaaatcagcttaccagccatgaacatcaggatagaaagccaaatcaagatattccaagcaccagtttctttcagagcatcctgcattgttaacacaccggtaatcatcaaaatagttacagccaggaaggcaacaaaagtcgcatctaattgtgggatcttaaagaaaccagacaaaacccataaaacaattgaaagaatgaagactgacatcataattttttctggagttgacattggtcccatttttgctaatttttcatcagcccatttcttagcatctggagtttctttaatctcaggtgggtacatcttgtaaataacaaatggaatgattactgccaatacagcaacaggtacgattgcagtgaaaaaccaacctgcccaagacatttgatagcccttttgtgcggctaattgttgagccaccatgttaggagcagcaccggtaataaacaaagccgttgataaaatattggcatgaaaggcagtaaagtcaatgtaggcaccaatctttttacgagaagcatcatctggcttagaatcgtagccttcttttgaaacagattcaacaactggccaaacgaccccacccgtacgagctgagttcgatggaattaaggcaccgagaattaattccaatccagtaatcgcataaccaatacccaatgacttcttaccaaatttttgaatcataatataggcaatacggttacctagacctgttttactaataccatgagccataatgaaggccatagcgattaaccatgcagcagagttaccaaatgaactaagcacgccttgattaactaccataccttttgcatttgtaacgtccttcattggtgctaagccaactaaaacagttactaccaagccagctaaggttgtaccaccaattggcaaaggttttgtaatacaccctacaattgtggcaacgaaaacggcaaacatttgccatgcctgaaccgaaaggccacttgggcgccatggagtaatacaccacaatacaattccaacgatcaaaggccaaataaagcctttataattcactttttctaaagttttcataagaatcccctattctctatggacgatacacatcatcaatgatgtcaaagcctttatctgctaagcttttatctacccaacttaaatcaacttctcctttgctaaaggcaattgctttagcctcatcctgctcatgaaaagcttgtgccttaggcaaaatctcaggagcatctttacgtggaatacaaattactccatcagcatcccctaaaatcacatcacctgggttaacactaacattcccacaagcaacaggtacatttatttcaccaggtccttctttatatggtccacctggggtagtactggttgcataaatcggcagtttccaatttcttaaattatcaatatcacgaattgggccaccaattacaatacctgcaattttcttttgatcgcgtaagtaagacatcattacctcaccaatcaaagatctagtgttatcaccctcgtcgtcgatgacaatcacatcgcctggctggcaatactttaaagccgcataaattgctaagttgtcacccgccctggtgtgaaccgtaaatgcgggaccaaccatttcctcatcaggattcgacattaacttaattctaggattcatagcacaatttcgttccatgcaatccgcggtattagaagctgggatctttttaaaaccagctacaacttttggatcaggcatttgcctctttaaataaattctttttcctacaggcatagagtagctctcccctctttatgctccctaatctatcttgttattgttaaacaagcctttttataaaaactaaaactcatcacaactcacaattagtattatacacttatcaatagattaagcggttacaaattttgaattattttgattttttgcttattttttgaattatttaaactcaaataattatgcaaaaaaagagaactggctaattaaaccagatctctttacttgatctttgttattttgatcttattcaccaaagttttcccaaggcattacatcgattgcaggttgatcaagcaactcttgcaattcttttggtaaaaattctttcttcacaatcacatcataaacatattgttcaaaccaagcttgactcatttcgtagaagcccttgtgaccaaacttgtcgccccatgagttttcaaccttccacttacggatatgaccgttgtcttcatcaacaccgactaaagtcatatcgtgagtagcaaagccctcaccagtattcaaacgatcagccttgctcatttgcgtatcaacgtcaaataattggtcagtcttgtacaattcagtatccaaaaagccagtttttctttccatttgctttaaaacgtcattaccaaagctgactgcttcacctgccttaagttgcgccactgcagcttgagctaaatattcaattggtacattcaaatacttaacttgatcaccaccagcaacattatcataaagtggcaaatggtaaactttgttgtattcatgattagggatgttggacaaagcaacataatcatcgaaattaaagctcttgaaatacttttggacaaaagcttgtggtgtcagatcacgttccaagtgatatttcttatcatcatcacgatattctaagtcaaatttctttggtggttcacccaaggctacagaaaccatgcgataaatctcgttcaagaattccttcttagttttttctgcttcatccttcttaccttcactgactaatttacgcaaaacaagcgcatcttttcgttccttgcgagccaagttctcagccaaagcagtagtattattggtattaaaactctctggcattgcgtatgaaggtactacaccatattttttaactaagttaatggccatggtccaaagaccaccatcttcaccagcaaattcaagccatgctttgacatgacgatcagtcaaaggtttatctgctaaacgaataattgcattgtaaaaagcgttagcacgttcaatcttgtcccagaagaaattataagcttgtgagaacgtaaaatccttgaccttgttttccttgccaaagtagtggcgcaaaacattcaaagtagtgaattcccagcaacgaccagaatgcttctgatcagttacaccgccaatatcaagttcagttgaaaagacatggttaagtcgttctgatacgcggtcattaaatgaagcttcaagcaaaccactacgacgagcagcacgagaagctactttattctcaggattagaattaaagctttcagaaaagccttcaatttcttgttgtgaaataactgtcatgatatacctcgttaattcttatcttttaattttttattaatcttttcttatataatactattttctagcttttttgtcattaagaaaaagtcctagtttttgacaactagggcttttaataaaattaatgatcaattaaaggtttatacctgacaaaacttcttgcatcttgtctgctgagttaatcatcttagcatgctcagtatcggaaagcttagtttcaattaccttttcgatcccttcaccgttaataacggttggggtacctaagtaaagatcatgcttaataccgtattcaccattaatcggagctgaaagtggcaaacaaattgcacgattgtccaaaatagctgagacaatttgagtaagcatcattgcaacaccgtagaatgtagcacctttgttggcaatgatcttgccacccttcttacgcacatcggtctcaatttctgctagaacatcatcgttgatttctgagtaatcacggagtgccttaccagcaactgttgattcatcaaagttttcaaaactagtatcaccgtgttcaccaagaaccattgagttaaccttagcaactgggacattcaaacgctttgaaagttcaacacgaagacgcattgaatcaagtgaagtaccagtaccaattacacggttcttagggaaaccagacaacttttgggtcaaagtcgtcaaaatgtcaactgggtttgcggaaacaacaaagacaccattaaatcctgattcaactactggcttaacaatactttccaaaatcttaacgttcttgttaaccaagtcaagtctagtttcacctggcttacgaggaacaccagcagtgatcacacaaacgtcagcatctttagcatcactataatcggctgcaggatgaatattggtttgacccataaatggcgtaatatcttcaaggtccattgaatcaccaacaggacgatccttagctacatcaaaaattgctaattcatcaacaattgtattttgcaataagtcatttgcaaaagttgaaccaacagcaccatcaccaacaagaaatacttttctactcataagttaaattagtcctttcaaatgtttataaactgttttttatctacatgattaattatacactaagcgctttcattagacacgatttattccataattataaattataatatcccatcaaaatctcgccagtgttattatttctatcgaaaaagagcagttaaccaaccgctctctttacataatctttcttatattatttactttcacgaacatatttagccatctgaatacctgcttgacgaccaaaaataactgtttcggcaattgagttaccaccaattcgattatttccatgaagtccgccagatacttcaccagctgcaaataatccatcaattacattaccattagtatcaagtacttgagtttcagtattaatatgaataccacccatagtatagtgaattgctggatgaacatgaattgcaaagtatggaccacgatcaagttcacgatccatcccagtcgttctgccaaattctttatccttgccagttgcaacggacttattccaagcggcaatggtcttttctaagttggcaccatttacgccaatttttttagctaaatcagccaaatcagtaccatgttctactaaaccaatctggtcataaaactcaactgcagcaaaatgagcccgcacacctgagtcaaaaatcaagtatgccccatcttcatgcaaattagtaattgcactagaaacaatctttcgtgtacttaattcattaacaaaacgttgaccattcttgttaactaagatagcaccttcaccgcgcagaccttcaccaattaaataaacatgcggattatcagtatctgcagttgggtgaacctgaatgaaattcatttgcattagttgagcatcaagtgcttcagcaagcttcagtccatcacctgtagcccctggctgattagtagtcttatagtcaactaagtctggacgatacttcttaatgatatccttggaagcaccaaagccaccagtagctaaaagaaccaccttagctttaactgttttaatgccatctggtgtctcaacttcaacaccattaacgcgcttcttagcatcttgcaacaacttggtaactttagcaccagtaaagatgtcaatacccgcttttttcacctgtgttgtcattcgtgaagttagataaaatccaactggttccattgaagcaggacggtgagcacgtttcttactcatccctcctgtaatggtcaaatcagttaaacgaataccatatttcatcaaccatgaaatagctaaagcagagtggttaacaaagtacttcaacatggcacggtcatttaataaacctccaccttttaaagtttcttcatagaagtcacggttattatcaatgatcccttcgtcaagctgaaccaaagattcagaagcgttcattccacttgaagcacgactagtgttaccaccagttttctcatttttttcaagcacaacaacatttagacctagttcatgagcttgaagtgcagcagtcagacctgctccgcctgagccaacaacgatagcatcatatttattctttaattcttttgtatttggcatttcttactttccctattcttctggagtagacttatcaacattagtcatttgcatatagtccatccattcatcatattgttcttcagtaactttaccactcttcaaagcagcttctcttaaagtagtgccttctttatcagcagtttgcgcaatcttagcagcagcatgataaccaatatgtggcgacaaggcagtaacggtcattaatgaattctcaagtaattcatccattctttcttcattaaccgttaagccatgaatcattttatcagcaaaaccagtaattgtaccagttaaaatatcacaactatctaagaatgatgcaatgatgactgtcttgaagacgttcatttcaaaattaccttgactagaagcaaaggtaatggtggtgtcattaccaaatactttagcagcagccattgtcacagcctctgcctgagttgggttaactttacctggcataatacttgaacctggctcatttgctggaatatttaattcatggtagcccgctctcggacctgaagcaagtaaacgaatatcttgcgcaatcttaaacatatcagcagccaatgttttaagggcaccatgaactacatcaagacctgaatggtgagctaagccccagaatttattagttttaacttcaaatttatgaccatagacttctgataatttaccagcaattttttcggtcattcccggtgctgcattcaagcccgtccctacagcagtcccaccaatagctaattcgtagagagttggcttcaattcacgaatatatgataagtcatgtttaagagcagaaatatagccagataattcttgaccaaaagtcaaaggcgttgcgtcttgtaagtgggttcgaccaactttaacagtcttccaatatttcttttctttaacaactaattcatcaattaagtgttgaattgctggttccaacttgtccaatgcttcaacggcaacaatattcattgcagttggataagtatcattagatgattgaccacggttaacatcatcattaggcaaaatatctaaacctgggtgcaatttattagccaagttagctacaacttcgttaacgttcatgttgctttgagtacctgaaccggtttgcaaaacatgaagtgggaagtccttacgcaagtcagtatcgcttaaagctagcaaatgatcaattgcatcttcaattgcttcgcctttttcttttggttcatcgccaacttcaacgttactttctgcagctgccttctttaagtgtaaaaatgctcgaataatttgcaatggcatcaattcaccacttgggaagttattgcggcttctttcagtttgagggccccataaagcatttttagggatcttaactggaccaatagtgtcactttcaacacggtattcttcttcgctcatattatattcctccttattaagctctataaggtttgcgttaattatcaatcaccatttataatacctgtaaaggctttctttttcaatttcattccaaaaaaagacccaggatttttcctggatcatagttttatctagactggtgattcattcttttagcaaagaagtcaccaatgatttgaacgataaaaatcaaaataattactaatacagtagctactaaagtaacatcattattgaatcggttataaccgtatgaaatagcggtattacctaaaccaccggcacctacagcaccagccattgcagtcaaaccaatcaaagaaataatcgtcaccgtcgaaacacgaatcagttctgagcgagattctcttaaataaacatcaaagataatatcacgcgcagttgagcccaaactttctgcggcttcaaccttacctgggtcaacactttctaaagcaacttgcacctgacgagcataaaatggaaatacgcctaaagttaatggtactaaggctgccttcattccgatctgtgtacctacaattttttgagtaactggtgcaacaaaggcaagcaggataatgaacggaatcgctctgaagattgaaactagcttatctgagaaattgtaccagaatttattgggccgaatcccgccatccttagttaaaactaaaatcacgccaaagataataccaagaatgccaccaaagatagctgaccaaaaagtcataaataaggtctgaaaaatactagtgccccagccaagttgaacaacattgggtaaatatttacttaagaaactaatcatgatatacattccccttttcatctaaacgtgtaaatgtcacattttgcttagccaaaaattcttgtgtttgcttttgcttagctggatcgcctttcaccaataccaccaaagtaccaattggctcttcattcaaaagttcaacattcccataaagcattgaaacttctacgccaatttgcttatacaattcaataatgattgatttagtcacattagctacgctgtaaactaattgataaattgcttcatttttgccaagcttatcaagcgccaatgaattcaaagtagaaatcgcttcaagtgatccaccaacaaacttcttggttaaatcctgcttaggatgtaagaagacatctcgcaaactgccgtcttcaatcacattgccgtgttccatgacggcgaccttagtggcaatcttcttaacggcatccatttcgtgcgtgattaagatgaccgttaagtggaactttttgttcaaacgcttaagcaggtccaagatttgttgcgtattttgtgggtccaaggcactggttgcttcatcagagatcaaaatatctggattattagccaaagctctagcaatcgctactctttgttgttgcccaccagataattcagctggataaaagtcagccttatcttttaagtcaaccagatcaagcagttccaatgaccgtttttctaattcctcatcactcaacttttcatgttttaaggcaaaggctacattttctaatacagtcgtttcatttaataggttaaaaccctggaagatcattccgatgtttctgcgctttaattgcaattctttattagaaatcacctgcttgccatctttaacaaattcagtgccatcaacggtaatactaccggcagttggtttttgtaaaagattgaccgttctaactaaagttgacttaccggcaccagagaaacctacaattccataaatgtcgcctttttcaatggaaagagaaacattattcactgctttaactggttcgcccttcttctgagggaaggccacttctacattttttaattcaacaatactcatttttgatcctccttacttcaacttaacgtcccaggctgcaatttgcgtattgccatagtattccttagttagcttcttagtttctgcagtttggtaagccttgacgacatcttggtaaagcttgtccttttgttttccttgtttgacacaaagaatgttaatccattgttttgaatctttgttaattggttcaatgtaaatcgtttgcttatcagtcaagccagcaggaccagcataatcattatttactacagaagcgtcaactgaattcaatactcgactagtttgttcagcaccgatttccttaatcttgtagttatttggattgctggtgatatcagctacagtaactaaggtcttacccttcttcaacttaattaagccagcatttttcaaaacaaacagtgctcttgattcgttagtagcatcgttaggcactgcaatcgtggcaccatcaggtaagtcactcaatttatgatacttgcgtgaataaagtctgatcggtgcgatgtaggttctaccaatggcgacaacgccaccgtgatttgccttattccaatcctttaagaaggcatagtgttgaaaagcattcatgtcaatatcgcccgacttcaaggccttgttaggttggttgtaatccgtaaagttcttagtttttaaggtaataccatatttttccttagccgttttagcaattgacttccaaattgcggcttcggctttactttccccaacgattccgactgtaacagtttttgcctgattttgactgggaattcctggaccaaaactaaaccaacctgcaatcacgatcagtatcccaatgatcgtccaaataatggtatttcttcttctccgttttctcataaaatacactcctactttgataaaaataaaaaagcacccatcccaaaaggacgagtgctcgcgttaccacctttaattcgctgatcacttacgtaatcaacctcactggctatcaaaaaatagcctgcactgttaacggatgcagccccgccgatagctaaatatcaccaccggtcatcgttccaaacccatattcactagctcctatttgccaactttcaccaccacgctggctctctttatcaatagaagttctagttactcagtccttcaagatgttgttttcttgatttgttataaataagttatcatcttcttttaatctagtcaacatcttttttaatttttattagataaaagcgatttcattgtataattaggatatagttaaataatttatttttgctaaggagaaaaaatgaagaaaaatcgctttcgaagttttgctctctcattagctgcagcaattggattcatttcttttgctaatactaatgtcccatgcaacaatcaaaccgtctatgctgtttcagataaagcattggtcaatttgaaataccacaacaaagaaattgtgaccgttgatcatgatcagccgcagttttctaagagtacattgagcaagaaaaaaggtccatggcaaaaatatagccaattagattatttgaaccgagctcatgctgctaatgctttactaaataaaagattaatgccacatagtcagcgtgcggctttaacttggaatccgaccggctggcataataaacgaatcgctagtggttggttgtataatcggtgccatctaatcggctatcagttgactggtcaaaacaacaatccacgcaatttgattaccggtacgcgtgaattaaatgatccggatatgcttaaatatgaaaatgaggttgctgaatatttacgtagttcgagcaaaaactatgtccgctatcgggttactccaatatttaaagggaatgacctattagctaacggcgttgaaatggaagccgaagcaactagcaaaaacgggcctcgctttaatgtctacatttttaatgagcaacctggtatgttgcttaattacaagaccggtacttctaaggttaaacatgggtctagtactattgctgaacatgtaaaatctagaaaacgatccacttctcgagtaaccaagaaacgaaccattcaccatatcaaaggtactgtatccactgcagaacaccgagtcgttggcaatcgtcgcagtaagatctaccatgtaatgaatgggcaaaattatcatatgtcatcagctaatgcagtttacttcaacagtgaagctgccgcacaagctgctggatatcgaaaatcattaaggtagtaaaaaagtcagagcaaaactctggctttttcattatcttcttatttcacattatttttgccacgatcatatgcttccttgaattccgcaaaagtcatgttctttcctttttgatcaaagacaaccaacacttcggcgattccatccaaaattttagataaccatctaaagatagtcactgccgcacagaataagaccgccaaaataaataatgatttgttattaagcattgtcaatgagaacaatcttgggaaaaagatagttgagccaataatacagataactgataagcccataacagcaagtctaaatttgtttattggtgccgaaatatgatacatcaccataaaaccaactaagactagcaacatagtcgctgtcgtgcctacctgaccatgatcaagtgagatagaggcccctgcaatgactaaaattgcaactgccagccaatctgttaagccccctggaattgcccgagctaaaacatttggcataaactttccacgaattcgcttgtggttgctttctaaggccaataaaaacgacggcaagccaattgtaaatgcagagatcaatgtgatctgggctggctgcagcggataattgattgtcataatcaaagagaagatggccatcaagaatgaaaaaatatttttcaccaagaacaagctggctgaacgttgaatgttattaactacttgcctgccttggttcaccactaacggcattttagcaaaattagaatcgagcaaaaccacttgtgaagcttgcactgcagcactattaccagaagccatagcgattgagcaatccgcctttttcatcgctaaaatatcgttaactccgtctccagtcatggctacggtattaccttgattttgcaaagcaacgacaaactttcgcttttgatcaggcttaacccggccaaagacattatagttttgcatggcctgctcatattcaccatctttaatggtttgcgcatcgatatacttatctgccccattaattccagcttgcttagctactcgagcaacggttaccggattatccccagaaataaccttgatatcaacaccttgctggttaaaatattgaaaagttgacttggcttctttacgaattggattcgacaataaaatataaccgagaacttgtacattttcctttaaggcggaattatcttcagttaatatgccaggataattagccgcaatcaacacccggtagccttctgccgcatatttttcaaattcagtttgatattgcgcaaattgatcacgcaaaaccatttcaggcgcaccaattaaagttgtctgattgccaaaaattacaccagaatatttattaactgaggtaaaaggcaaaatgctatccgccgttttggttccatctttaaaataggcttgaatcgccttcatcgtcgcgttatcagctggcatgtttttagcaaaatccgcaatgatgctacttaaatcaccagtaaaattcttgctactaacagctttttctacggccatcttcggttcggtaattgttcccgttttatctacacaaaggacatttactcgggctaaagtttcaacactcttcatatcgtgcagcattacttcttgtcgcgctaatcgcatagcagctagagctaaggcaatcgtagtcaataaatatagcccttctggaatcatcccaattaaagcagcttccatggaagtgatactacgcttgagtccaatattattcaaaaagaaactctgactaaatagggcaattcccaccggaataatgatgatgccgacccatttaaccagacgattgattgaacgcaccatttcagattgttcaacactgcccattgcctttgctttgatcgttaatttagaaatatatgagtctttacccactttttctaagacggcataagccttaccggaaactacaaaagaacctgacattaattctgcgtctttagtcttagtgatttcatcagattcacctgtcaacaaggcttcattaacccgcagctcacctgagattacccgcgcatcagctggaatctggtcaccagtttgtaaaagaatgacatcatcttgaaccaatttttcgatgggaattttttcttcttgcccatcacgcaccgcgataatttccgtcgcattcatcacgtttaacttgcttaaaacttttttagcacgaagctcctgcacaataccgataatcgtgtttaaaacaatcactggtaaaaaagtcagatcgttccaggcaccaacaaacaccaatagcacagccaaaatagcaaaaatcaagttaaaataagtaaagacattttctcgaattatttgagtagctgttttggactggtcatcaatggcttgattaacctgtccattttgaattctttgatcaacttcagcttgagttaatcccgttatttgtttatctgtcataattttctgtcctatactgaaaatactttcatccattatagcgaaaaataaaaaagccacgcaactctgcgagactttttaacaattatttattttttctacgataagttaaaaaagtatagtcatacttgttcttttcatcatgatgatgctcttcgcgactaactaattcaaaatcatcatagttaatcgctggcatcactgtatcagttttaaaattagctttgatctctgttttttctaaaagatcaacttgatcaagtaacgccctaaagattgaaactccaccaattgcacagatttcttcagtctgatgttgacgaagatattcatttaattcagctaatgtggacacaatcttcacttgctcattacccgcatatttttgctttaattcttgacgatgagttaaaacaatatgttttctctctggtaacaagtgaggcaaactcgcaaaggtttttcgccccatgatgatcggatgacctatggtcttttccttaaaatgcttcaagtcagccggcagatgccaaggcaaatggccatcgatgccaataccatgctgctgatcttcagcccaaacaaaacttaacattgagacctcctaaactgcaaccggtgccttgatcgtgccatggtgctgataattcagcactttgatatctttcatttcaaagtcttcaatgtgctttttttcaggattaagccacaattcaggtgaatcatatggcgtccgactcagcaattcctttacttggctaaagtggttgcgataaatatgtgcatcccctaaagtatgtacaaattcacccacttttaagccggtttcacgcgcaatcatgttcaagagcagcgaatatgaagcaatattaaatggcacgcctaaaaacatatcaccacttctttgataaagctgcacgctaattttgccatcgactacataaaattgaaacatcacatggcatggtggcaaagcactagttggtatgtcttctggattccaagctgtcacaatcatgcgacgtgaatctggtgtttctttaatttgcttaattacattagcgatttgatctataaagccaccacttcttttttcccagtgacgccactgtgctccataaacatcacccaaattgccatatttttgtgcaaatgcagggtcatctaatattcgttgatcaaattttttcatttctgcttgataaacttgattaaattctggatcactttgactacgcaagccaaaatctgtcatatcagccccctgatattcagcactttcaatccaatttttaaaggcccattcatcccaaatatgattgttatgctctaacaaaaagcgaatattagtatcgccccgtaagaaccacaataattcacttttaattaaaccaaacggcactttcttagtcgttaaaagtggaaagccctgtgtcaaatcaaaacgcatttgggcaccaaaatatgatctagttccagtaccagttcgatcatccttgtcatgtccttcagtcataattttttctaacaaatccaaatatggttgttcaagaattgccattatcttcacctttcaaaaaacatttcttctaacataccatagatcttgtatgttggataatgaaaaaccatagatttagtatttcatacaaaaaataaaaaggtgaataatcaccttaattatttttcttaaattcacttttatgtctgactaagtagacaattgttgccacaatcaagactagtgccccagcgataactgaaattcttgtatcaggattgataaacataaaaatcacaatcagtattaacattgcaaaggcaaaataattcgagaatggatacaaaggcaacttgaatggatgatcttgcattgcacctttgttatgtcgtctaaatcttaattcagccagcaaaatcacaaaccacgggatcatccctggtaaaacagaggaactaaagacaatcacgaataagtcactggctgaatgattgaattgcgaagcaattacattcaaaacaaaaccaataaaaataccaccagaaatgcccataatggcccgatcgggtacaattcgcttagaaatatgcttaaaaataccaggagcttcatgatcatgtgacagtttaaacagcattctacttgaagaataaattcctgaattagctccagaaagagccgctgttaaaacaacgaagttaattattgaagcagccgcagtaatccctactttagcgaaagtcgttacaaatggtgaacctaggctgtctaatttatcccaaggataaatcgttacaatgacaaaaattgctccgacatagaaaattagaattctaaacaaaactgacttaacacttttaacgattgcctcttgtggattggctacttctccagcagaaatacctaataactcgattccttcatatgaaccaacaatgattgacattgaaaagaaaaatccttttattccaccagtaaagaaaccaccgtgagaccataaattgctaaagccagttggatgtcccccattaccaacgccaaagaaaataacaataaagcctaaaataatcattagaataattgttactactttgatcatggcaaaccaaaattctaatgaagcataggctttagcactagctaagttggccaaaagcagaaaggcaataatgatgatccccgaccacaatgctgaaatatttggccaccagtacttcaaatattcagttgccgcgactacttcggacattcctactacaatatattcaaagacattggcccacatcgctaaatagccggctaagggatgcacatattctgttgcataatcagcaaatgaacctgtaccaggattgatatagagcatctctcctagtgctcgcatcacaatgtataaaattaagccaacaaacatgtaggctaataatactgacggaccggtccacttaatagtagatgtagaccccataaacaaaccaacaccaatagcaccgccaagtgaaatcatctccatttggcctgctgtcatcgtccgtttgagctgaggagctttagattttttattcaattttcacaactccaataattaatctatcctaattaataacccgcaattaatttactggttaaatcaccattttgtcaaggttcaaattaaaaatattaatatttgggagtcttttctctaattgatcttttattcctttattaaatgaatttcacgatcaaacatttgctgcatctttttattaaaattatgggcaataaagacaattgttgccttgctttttaatagcttttgcaaaatattcatagtcgcagtctgatcaattgcactagttccttcatcaatcaaaataatgtcactgtcatgaatcttagctcttgctaagacgattttttgacgttgtcctccggaatatccaagtcaattttttcatcgacacctgctttaaactttttaatatcggccgcaaaattaacttcatcaagcacttgagctacttgattattaagttgcttgttgaacattgtaatgttttctttaattgtacccggaaataggttcggctcttgtggaatatagcctattcttgacatattaggcttaattgtcaaaccttgactattttgaaattcaattttgcctgtgctaggtttaagttcacccaaaatcaatttaaataaagtagacttacctgcgcctgaatctcctgttaataagattttctcgccaggtttaactgcaatatcaggaaaagtaagcttttcaccattaggatactgcaaagccaaatcttttgttgaaaatgctactggtgtctcttcttggccagctttaactttttcaatcacagtagcatcaccatcaacttgtttcattaaatcctgtgacgatttcataaaacttaatgcctgaattgtttgttgtaagccgatcgaaatattagctgcaaagttttggacagacataattgcaccaaaaatcactaaattcttagtgatcaaaaaagccgtcaaagacaacaggattatttgtcctaccatgttacagatcccattcaaaataattaattgctgttgagcagccgtttgtttaacatgagcctgttctactttacttgaagttttttcacctacctgaaataacttagcaccagcaaaatatcttcttaattcttctaagccagagaaccatttagctaaaacatctagataatgcttattttgctcagaaacattattagttgcttgttccattttcttttgtactaatttaggtacaaagtaagaaacaatatcaatcactacactagtcaaaaagattgaccaattaattgtaagtagagccaccaatgccgcaacaaacattgagccatagaacggcacaattggataccaatcaaaataattttttctaatcatttctaaatcattagtcatccgattttgcacggccggtacttgatgattttgaccatctctaaagtaatgtgtagccaaacgagcgcgcacctttttattatattcttcttcctgcactcgaattacaaattggatataatagatcatcccttgagcagctaaatataaaatccccattaaagccgtcgcaagtaaaatcttcacccaagcacgatctttgatataagtcagccagtacatttgaatgtagcctgcaccaatagcagcgacacctgaaataactgataaaatattaatgtaaataaatcttaaataattagttttaataaagcctttgaaactcaatcagcgtcacctcgattagtcaatttaatttgtcgatcaaacattgaaactaattctgtagaataattgtgcgcaatcataattacagtacttggagtattcaataaattttgtaatacttgcttcgtcccagcactgtcaattgcactagtcccttcatcgatcaatagccaaggtgattgatgaatcaaagctctggataacacaagcttctgcctttgtcctccagataaatttcctttatccaaatcaatttgactattaagtccagcagacatcttattcaaatccttggtaaaacctacttgatctaatacacctgaaatttgattatttaaagcactattaaacatcgtgacattattggcaattgtgtcaggaaacaaggtattatcttgagcaatatagcctaattcatcaagatcaaaatttaatttttgaccattatgatcaaaaaaattgatctcaccttggctgggcgttaatttacctaaaattaatttaaataaagttgacttgccagttccactatcaccagtaagcaagattttttcaccttgcttaactgtaaaatctgggtaagataaatactcaccatttttgaattgtaaggccagatcttttacttctagccagttaatcttcttaacttgatgctgatctggagctatttttactggagcttgaagattagtaatttccttattcaaatccttggtagatttaattaaattccattccgttacaaatgctgaaacaccattcattacagttgaactaaattgaatagtagtaattaccccaccaaaaacaatttgtccttgcaaatataagtaagcacataaaaccatcaagagcatttgtcccacaatattaactacaaaggtgatcatatctgcaatagcaatagttgctccttgatgaatagctgcttttttatattcgtctgcgctttggttaactgattcactaaatatattaaaactggcatatcttcgtaattcatccaggccactcatccactgggctaaagtgtttaagaacttttcatttttcttagtaacctttattgtggccgatgaagtcattttttcaaaagttttaggcaaaaataatgaaattgcagttaaaatcaccgtcattactactaaaagccagttaaatgaaaacaaaattccaattgagaaaagcacagacaacaagtacataaaaccgtttttgattggttttaaataattctgtgttagctgatcaagattggcaaccaattcattttgcactttagcagtttgggcaatttcatttttaaaaaagtagcgactaatttttacacgaatttgatgcaaataagattgtgattgctttccgtataagtaatctgaactagtaatcaaggctaatctaactagatcacagccaatagccaaacaaataaaaataataaagccaaataaattcattttctttagctggttaaaggccggggtcatcaaatattgcgaagcagcatcaacggtcgtaccaatgataaccattagaaaaattaaaatgaatttagctttattgaccttaaaaatccctttaatactcatttgtctcatctccaagcaaattaaaatattaaaaatatcttatttatgtttaatattaccgctatttttttaatattcaatcactttttactaagtggttaaaaaaataacttgaacggcaaaattattactatatctagctaattcattaggaaaaatttggaaaaaaatagactagaaactcattatcaagcttctagcccattagtttaattcaattattaacggtaattcttcaagaaatccatcatcttttgataagctgcatcatgatctgcatcatatgcatcgactacatcgactactttattatccttagtaataatacggtactcacgtaagtctttcttttcattagcaacaactgtaatctcacccttacctggggtagagaacaattctggattaagttcttcgttcaacttatctgataattgttggttaaatgcgattgtattcatttttgtttttatctcttttctaaaaaatccaacacagacattatatcattattagataacgttgatgaatttagttttattttttatcaaggagaactgtacctgcagaaggattatgatcaattgcaccaatgatggagcagtaacaccttcaatatagcacagcaatacttattccaaaaatatcaatttgttattttgccttattacttttacgtatagatttcacttaattaaatgcacaacaagcatggcaattcctaagaagacaaaaattaaggcaacaatcatactagttactgtgccggtaactaaacctaaaatgatcatgccaataattgaataaatattcatttgttatcccttcaattaaacaataacagcagtatttacttttattatgtagcatgaacactttaaaatacaattttaacgtattttaatttgctaactttcgatataacggcaatagctgcccaataccatctaagatgaagttttccatatctgcaacttgatcttgctttctaaaagcaaattttcctaataggaaactggattgagttgcttccttattaaataaagtctgtttttcagcatctgttaaatactcatttaaggataaatgatcagcaaactccatttcgtttttatcccataagtaccaattattagttgtccgcccttttgcccaatcaggaagatcagttaataatttattgtattgttcaggattatcgccgcgcttttcactcttataatgctgaaacataagataaacctgcagctgcttattatccagcatcacgccgatgcatggacttttatcggctaaagcattcaaacgataagctgcccagtaatgatcgcgtaagttccaaccattggtccaactttcaacatgaactttagcaaatttatcttgtggtaatttttgataaacatttaagtttatttctttccaggtctgccaaatttctttaaaatctgtttttatttgcgctaattcatcttcagaatattgcgatttcaattttttaaaagaaaattcatcccgatcaaaaattgcatacatttcttcagttaattgcgtcattttacaaagcccttaccatatttacgctagtaacaccagttggatctggaatatcatcattggtctcgccttcattataaaaaccacgtttttcataaaatttaatcaatttcggtaaacaagttaaagatatagcttgacgattttgctttctgccctcttgcgctattgcttcaattaattttgtcgctacgccttgtttacggtattcaggcaagaccgctaagctcaagaccatttgatagcgatcatctttttgattaggatgattttcaaaatataattcatcttcaatatagcgtttattaaaagcaggaccaaaaatatgaccaatcacttttccatcttcttgtgcaactaaaaaagtatcaggataattctcaattctaccaatcatatcttgttcagtttgctttttagtcatcttaaatgcgtcagattccagttctactacttcatttaaatcatccattgttacggtgcgaatgatcataataagcatcctccttaggtttatctctaaaagtgaaaaagggttcaaaagtcatctagactcttgaaccctatattattactctctatttaattcttccactttaatttaagacgatcttgctcagtctttttttgaaaatacgtcttcaccttcggtacaacttcttcgccataaattctaatggcattcatcacatcttcatgcggcattgaagcaattggcaaatgaagatagaagcgagttaacccaagttcttccatgactttgatgatcttatttgcaactgtctcgctagcaccaacaaaaattgcaccattttctccgaccgattcaagatattgttcatatgtcatccctgtccattgcggtctttccgtactaatttgatcaactaacaatttggtaggatagaagtaatccttaattgctttgtctttatcatgatttaaccagccccaagagtgtgcagcaattggcatcttcgttaaatcattgccaactttttctgcaactcttctgtacaacttaattagtggtttaaagtgcaaaggatcaccgccaattatcgcataaacgattggcaaacctaactctgcagttcggatagtcgattctatgcttccgcctgtagctacagaaatagggattggctttttagtgcgcggataaattcctttatgatcaactctaggtgtaaactttccttttggcaaatcgagaatttcttctttgttcattttgagtagcatttctagtttttcaataaaaagttcatcgtaattttctaaatcataaccgaatagatcaaatgcctcagtaaatgatccacgtcctgccatgatttcaactcttcctggtgcgattgcatccattgttgcatattgttcataaactctaattggattaattgttggtagatttgtagtagcacttgaaagatggatttgcttagttttcgaagcagcagctgctaaaatgatttccggtgctgagacagcaaaatctttgcgatggtgttcaccgattgcaaatgcatcaatattcaatttgtctgcaagaatgatttcttctaataagtctctgattctttgatcatgactaattgcttttcctgttgtttctaatggtgtagtttcaccaaatgatgagatacctaattcaatattcatttttatcaactcctaaattatttaacttactttttgtaagtaaaataatagcagataatttttgaaaaagcaatatcttgaatatgtgagtaagtgtcaatgtttttgcggtagcctttaaaccattagtctaaccttaatttcttaaatatttatatgacttaaatttctgcttagcttgcttaaataactattgccagctacctgtgcggttaatgcgccatgctggatgcctaaatgaacttcatgacgcttctttaagctgtcacgggccgctgcttttaattcctgttcagtcaatacagttatttctgaatcttcaaactcgctgctaagccaaaattccagctctcgattcttgatgcagcttaagatcctaagcatgccttctgctccagattttgaccatttcttgccttgccccttaacacggtaggtatacttgcggtggttgctctcgcagcagccaatggctttagtcacagtcagttttcgtttcttaaacggcttaatatcgtcccaatgacgatcaatataattccttaggcgccccagataatcatgattgagctcggtattcaattcatcaattagtcggctttctgcagtggttaggatagttttaactttgtcatagctgtatttgtattccaaagcagaaatcagcttgccttgcaggtcaggcgcaaaatatagcctttctttgattttcttatttaggtgaaagacatccaagaaatgctcatgacgcttgcatagccctacaatgtcatcgaagtctattttggcatatccagcaccgccatcggcgttgctaagaattacagtatcagaaagatcataagtattggccaggtactccttggcttcgttcagcgcatcaagtcggcttaaagaaacaaattccttggcattgattcgctttctgcgtttcttgcttatattgacaatgccttcacagacctgatagcgatgaaattccaaccggcttttagtgcctttgatcaccacgccatcgccttcaagatacaaaactgggacctttttcttagtgcctgcggcatcatatcttgaatctgcttcttggcccgctttaatatttttcccggccatttttaccaaattgcccacctgcatatggctaatattaaagccagacaggcaattgactgctagagcagtattgcgataagtggcaacgctgcttacttctaagatgtttttgactgctaaaatactgtagcgcttgtatttgtcaaagcccattaattcatccaagggataccttgcttgtttgcctgggcagacatatcttcttctgacatacctaacttcgccaaaagccatattgattgagcgctcattcttcttatcaatctgatagccctgtgctttaaccttggtaatcatttcatcatcaactttagctaaagccaaggccatgatttccttaatcaggtttaagaagaaacagattatttttctttcacgcttaatataattatcttcagactttataatatttgcgatttcagttacaattgaattcataaaagaccagcttctaatgtgttttttgttcttaacatcagactactggtctttttgtttgagctcaagtccaaattcaaaggacttgggcttttttaattatttattcaacttaccgtaaaaaattatacacttagaatatgtgatcctttacttagttgcagttcttctaccaacatatttgataaataaagccatgattaaaataactaaacataaaagaaaaatatatgcatgctgtgttccgattctggttaaatcagctgacttagtacctttttgactagaagcaacgattgctgaagtaattgaagttccgacagcaccggcaaattgttgagcagtatttagaatagcgttgccttgagtagtttcactctcatcaatcactgccaaagtatcagtcataacatctcccaatatcattcccattcctgccatgtaaatgatataaactatcaatataaaaatattattcatctgattaggtaatactgcaaaaaacaatgtttcaagcaacatcaaacttacaccaaataaaacaggtttgcgtgcaccataattatctagcaaccgaccaccaattggacccatgattgcaccagcaactcctgctggcaaaacaatcaagcctgctaaaaaagcagtattatgattaaccaattgaatgaaatttggcaataaaaatgcattgcccaaagatattagttgaatgcagaaaaaaccaataatatgacctgtaaaactatgatttttaaataattttagatccaaaattggcattttaattcgattagatctccaaattaacagagctaaagctaataaagcaatcaaaattggaatagcagttgcacccaattgtcctgttcctaagttgctaaagccaaccagcatcccaataaagaagattgcaattatgataaagctaaggcgatcaatcttaacttttttaacagcagatttttgttcaataccccagatgcctaataacaatgaaataataatcaatggaattaaaaaccaaaagacccaacgccaattcaatgcctgtaggacgattccgccaaaggttggcccaagtgctggtgtgattccagtgatcatactgccgacacccatcatagtaccaactttacccttaggcacttgttccaaaataatattaaacattaatggtaaggcgattccagtaccaatgccttgaattactcttccgagcaatagcaccggaaaaattggtgcagtagcatcaactattaagccaagtaaaaacaaaaaattagcggttaaaaatagacttttagttttatatgaactttttaatgcagcagagattggcacgataattgaaactgcaagcaaataaattgaagtcatccattgcacaacattggttgaaacattaaaatcacgcatcaaggttggaaaagcaatattcattgaagtttcaactagaacgccagaaaatgacattaatcccgtggcaattactgctgcaaacacttttgatgatattctttcattatttggttccattttttcctccatttttgacaaattttaaaacttttagtgccgtatttatttcagcttgtgtaaaatgactacgaacttttcgatcatcttgacgcatataatcttttatcttgggaataaatgatttactcttagcagttaaagaaacatccttctgtcttttatcgaccgcattagtaacgcgtttaactaaatctcttttctccattctttgaatcatgattgtcaccgttgaacgctttaaatctagttccttttcaatttcatgttgtgaaacagtttgattttgatgattagaaataaaatctaaagttgtcatttgaacgccggtgatacccaaagtgttagcaaacgtctctcgttcacgatctatttgaacggaagattgcttaataaccttttttatcggttccatataggtcctccttttgttagatgtctaacatattttgcatttatatttgttagatatcaaacatattttttactaatttgagactttagttcaaagtaaatactagtaaatatctatttcatcatttgacgtaaaactcacatctaattctttgagactgtaaaatattttgtgtaaggatgaatgattccttaaatttatttctttaaacattagaaaaaggggttcctttctcgtatgattggtttgaacaaaaaaacacatacagaaagaagaactccttcatgaatgattttaccaaagattttgctcaagctctattcaatccagacaaaataaatgatttattgcgcaaagagctacaacaggctgttaataacttgttagaagctgaattgactgcctttctgggctatgatccctatgccagaaatggctggaatactggcaactctagaaatggtgcttatttccgcaaagttgatacgcaatttggcccaattgaagtgcaagtgcctcgggatcgcaacggtcaatttcatcagcacacgctgcctggctacaagcagcactcggatatcttggaaagcatgattatcaagctttactccaagggcgtgaccaccagggaaatagccgatctaattgaaaagatgtatggcagccattacagtccagctcaggtatcaaatatttccaagcagatgattccaaaggttgaggcttaccacaaacgcaagctaagcgacaagtttttctgcgtctatttggatgcgacataccttcctttgcgccgagaaacatttgagcgtgaagcagtctatattgccattggcatcaagcctaatgggcacaaggaggtcatttactactgcattgcgcctagcgagaacattgaagtctggacagatatgcttcaaaacatgaaatcccgaggcttaaagcaagttgagctttttctttctgatggtgttgttggcatgaaaacagccttggccaggacttatcctaaagctcattttcaacgctgtttggttcatgtcatgcgcaatatctgcgctaaagtacgcgtcgatgatcgtaaaaagatcatgaacgaattcaaacaggtgcatcaacagacaaacaaagaagaagccacagctgtcctgcatgacttctataccaaatggggcaaggtttacagccatgttatcagaagcttgaaagacatagaaccagatctgctggtcttttataactatcccaagcagatcagagcttcaatttattcgactaacatgattgaatcatttaacaatgtgatcaagcgcaaagctaagcctaaggcagagtttccaactgaacagtcgcttgatgcttttattggcattcaggcaatgagctacaatgaccgttatttcaatcgaattcataaaggctttggtcaggttcaggacaccttagaatcctactttgattaaataaataattaaaaaatcaatttacgagaaagaactatttacacaaaagatttgacagtttcaattctttactaagaaaaggattttagttacatttgttgctaaaatagatttattatttctactcaaaataaggagttaatcataaatgaataaactaaacttcgaactactgcatatttttgatgttgttagtagatttgctagcttcagtcaagctagcaactatctctacctagaccaatctactgtcagtaaaaaaattagacagctagaagctattgtcaataagaaattatttattaggaatactaatggtattgtcctcactgctgctggacttgcttttaaaaataagtcagataaaatacttcaagatttaaaagaaataattgcgctaaagccaactataaccaccttacgagtcggggtatttgataatataagtgcctatctgatgcccgatatttttgctgaaaattttaatctatttaatgagggaaaattagatgcaatagttatcaatagcgacttctttactcaaattcaaggttctgcaattgagacgcaaattactaatgaatcttttgcaattctctttcgcaaaaataatgctctcattgcaagcaaaaatagtatttcgttaaatgatttaaaaaataaaaatcgtaaatcaaaataactattataaaaaatatttattggtaatagttagctatgcataaagcgaatgaataaagattattaattagctattacgtttcttaatttggcgattttgtgttaacttgattgttatccaaataacaacgtatgaaagaataaaaataaacaatgtccaaatattgatagaccaattatttaacaacatcattattgagaataagctaaaagttccaattaacataaaaagtcttcctttccgaattcactatttaaataagtggttaaattcaaaatacaggatgctaaaatttaaaatcctaaaaattaatatctgtaagctaaatatttaagttattgaactgagtttgctatatttaagttaaaagataataaaaggaggaatttcatgaaagttacttttaaaggaaaagaagttgaattaattggcacaccacctaaggttggcgatgaaatgcctaactttacagttttagacaaaaataagcaagaagttactaaagataatttgttaggtaaaaatactttaatcagcgttgtgccagacatcaacacttccgtttgcagtattcaaactaagacttttaacaaaacaatggatcagtttcctgacgttaactttttaactatttcaactaataccatcaaagaccaacaaaattggtgtgcggctgaaggtgttaaaaatatgcaattaatgtctgatgaaaaattatcttttggtaaagctactggcttactaataccagaatctggaatactagcacgcagtgtgtggattcttgagcctaacggtaaaatcgtttatcgtgaaattgttgatgaaattactcatgagcccgattataatactgctgtaaatgaattaaaaaagttgctgtaaaatttaaaaaagattgcctcagtacatacacatatgctaaggtaatcttttttttctacccaaagtcaagtattatcaatgatttaagaaaataaatttacttgttttaatgatgcgaataaggttaaagcaaataagagtttaaatttaagaaaaagcgaaagtaccacaaataagcctatgaatacttgtagtttttccataggttgcttatacttaagttgattatttgatttcagctaaagtcttttattttcggtggctatgttgtaatcatataattgatcatgtttgataagagcaaacattgtgcgtatcagtttatggactgatgcaatggcgattttcttatagccttgtctatttgaagatcgttttttcttgtcataataatcagttatatggcaaggctgcgtagcctttaccgtctccatttgagtaataactcgataaagtatttttctggcaatatgattgccatgcttggtaatgccaagagaactgtctttttcaccagattggtaccttcctggatcaatgccaacaaacgcatcaatttgagctgaagtgctaaaccgtcttagatcaccgagctctgctactaatctcactgctgtaattctagcaacccctgggatactcaaatagatggataaagcacgagcgtttactgctttagccagcttttccatgtagttaattacatagtcgcgttcttgctggagtgaaaataaattagaaatgttcctttgaatagctctaacgataatactatctttggaatcataaggataagcttctctagcaaaagcgtataatcttgtggttaagtaccgtgccctttgttgtcctattccagaaatagaattaagcatttgagttacctgtgtctcattcttttctagaacatatccagcatgtgggaaaagactaacaagcgcccaataaattctgccagatggatgagacagtatttcttcaatttgtgggaaagtggattggaggttgcggtgcaattgatttttagtagtaactatactcctagtaagttcttcataatagcgactggcattctgaagttcatgatactctctgggctgtggatcacgcagcttttgcggggcattaaattgaattaaagccaggcgataagcatctaccttatcagttttattatggcgtaaattattgtccattagctttttcgctttaagcggattaagcttcaaatacttaatatgataatcctctaagaaagcttgcaggcttagagaataaacaccagtagcttcgaaaacaactaaaggagttatcaaatattggttcagttgctcataaagtttttgatagccaaaggaatcattagagattctaaaagattcgccttgtttgatccggtcattaaccacacaaactgtggaagatttactgctaacatcaataccgaaaataatttgtgattccataatataacctccgctgtgaagataaacctctttatcaacctattaattctaattttctaaacacggcatctaagtgcccacagacttcgaagagacttaagaataggtggtaaagcagtccgtttcttttacgacatcaagtgtctaaaaagctgaagacttgatttgctttatcttcactttctattttagacaaaataaaaagtgccagatcgtgaatccgtcgattcatgatccaacactaggttagtatgtttctttagttcttatattgttccattctttgattaagttcttccttattaaaattatctaaattaattgcttttccacccattaaccaatcaatcatttcaggatctactttatctttaggcgtatcgtaataatcttgcaaagaccatacaccaccaatgtcatcaattattccataaccttttccagaaagtatctttggacacttaggagctgcttgatcagtagtgatgttcttaatatctacttcgaattcccagctatcgccataatcataagttaataataatttatctctcttttcaaaatacgaaaccttagctttttcataatctatgcctgtagccggatcccaatctttcgcttcagcgatactttctgcattttcaaagcgttcctgcgtttttttattcagcaaatcaaacatatgtccaaaatctgcattaaacatatctagcatagcaacttctaatgttttcactgacgtattgccactaataataaatctacgccaagtagatggtttaaaagactttagttttactctaatttcataggtagctcgattgcgagtttgattttcaaaaattgtcttttttcgtgttttctgctttttatcatgactctcaagatcttttcgcaagccttctaaaattctagacaaatcctgagaagacagatctaaatcttcaagttccaaaatctttttaggatttgcttcaattgccgctatcatatcgtttatcaaatcctcatccaggccttgatcggagtatgaattaatttcttcaactacccagtcaatattcatccctatttctttactatcagttttacgaataagacctactctactcaaaaatacatagaaatttttcaaagtatttgtaatctgctctatttctagcggatgtagtttattgttagatatcataatccataaataagaaatcgcttctcctaaatcattagtaactaaatggatcttattacgtaataaataatgatttagataatccggcagcatttgatcaggttggatatatcctattcctgctggtacatatttagcatattgatcaatgagtttttgattattttctttaattttagcaacaatcttttcattgccttttactggtttattttcatatttttcaaaattagagaaatcttcaaattttggcactaagtcaacatacttatatcttcgatttggtttttgcggcttaatagggaaatacgtactaacctcatcaatcatcttagaaataaaattttgtccaatctgactatccaaggcaaaaatagtcgctgacattacagttagcttatctacgatattcttttcatcttttacaacatcaatcaaatttaaatattcgctttgattatcctctataagtttacgaattttttctagcattaaactagcttggcttttagtatcgtaaaaagacatttgcttggactttaccgctgaaactaatttttgttgctgtttaaacaaaataaagtcatagcttttaatcgcattagcaaaaacatcattaaacagtttggtatcaagtttagttaataaaattggaaaactagtgtctttttcaactaataaatagtacttttgcttttgaatatttattacatctgcatcccaaacagtaaaaggctcattcttaataatatcaatcttattttctttaatttctggtgctaagttaataccgtatcgtactggaagcatgtggttctccttattaaaataatttcattttaattttatcatgtctattcacaactattcatctcagaagcaaaaaaatgaaggcaatcactgccttcatctaaaatacacaaattttagtcttcttctaaaaccggtactgtctttttatttctaacatgatatacaactaaaccaattgctaaacctaccagtgctggcactaaccatgataagcccatgctggcaagtggcaaatgatttctaagtgaagccactgctaaaccaaatgaactttgactaaccacacttgggaaagcaactaccatatcgcctaaagctggtacaacagtaaataggattacgaaaaagtaaactacacctgccttattaaacaatggtgaacaaactgatagcaagatcaaaaccatggataaaggatataagaacattaacattggtgttgaccatgaaatgatttgatccaaaccaaagttagcggctaagaatgatgccaagcaactaagtgctaaccaaacgtggtaacttaccttaggaaaatgcttatgaaagtcttgcgcaaaagcagcaaccaaaccaactgcagtagtcaaacaggtaactgtcaataagaatgcaagtaaagcttgaccaaagacaccgccataaacgttaacgatttggttaaaggctaccccaccgttatcagaaactgcaaagcgtccgagtgacattgcacccattaagatcaataacaagtagataaaaccgatttctaaaacggccaagacacctgatttagcaacaacttttgaaacacttttagcatctttttgtcccatgccgcgaacagctgtaacaaccgtgaccccaaaggctaagcctgctaaggcatccattgtgttataaccttctaagaagccatttactaatgctccatgcttataagctgcagttactgctgcagtttgtggattacccaacggacgagcaaaagctacaagaaacactaggaataataatgctaagaataatgggtttaataccttaccaacgttagacaagatattattttgatgataagaaaaagcaaaagcagctaaaaagaataaagctgaaaaaacaagtaaagcggaactttgcatattcttcggcataaatggtgcaataccaactgtgaaagaaacggttgcagttcttggggtaccaaacaatggtccgattgtggcatggattaaaaccataaatactactgcaaatccggcacccagcggcttaccgatgtcgtatactccgtctgcatgagtaattgctactgctaatacagagaataatggtaataaaacccctgtgatcaaaaagccaactgcagctgttccccaatttgctccagctagttgtcctaaatgtaatggaaagattaggttaccagccccaaaaaataatccaaacagcaaggaagcaacaacgagataatttttccatgtaagttttttcgatgtatgatctgtcattttctctcctccaaaacatccctgataaacaaaaaaggccctcagctgcaaattgtaactgagggacgctttgagcgtggtaccaccctttatttatatcactattgctagcaatacctttcacgtacagtcaactacttgacgatacgtaggcactataatgggtgctcccactacttcttactttaagttaagaaatagaactcgaaagtgattttcatttaaacttaggatttatctcctcacacctaacgagactcgctgtaaattaagtctaaattactcttctttctctttgttttcagatttattaaatttgttaataactattttaatcaaaatataatcgttgtcaacaacttttttatttatttttcaaattttctattcccggatttaaaattgaagtgcaacactaagtgttaaacaaaaaggccatgaagacctaaacttgaagtgacgaaaaatcaagaaaggaagatcttcatgaccaattcaaattctagcatttctaagcactatcatcaattaaccagcgtacaacgtggacaaattcaagcaatgctggattccggcataacttcccgtactgttatcgctcaagaagttggctgccataagtcgacaatcagtcgcgaaatcaaacgcggaagcgtcctgcaaagagacagcagctatttattgtatgagcactattacgctgatactgcacagatttattatgagaagcgtcgcaaaaactgctatcagcgcaatccattgaagcattatgctgtctttttgagaatgctctccagacgctttaaagctaaatttgatgccaccagcatcgatgagttcgttggtgaattccaaaggactatgccaggctacccttgtcccagcacaccaaccgtctatcgctatattgatcagggcttgctggacataagcaatattgatctgcctatgaagctcaaaagacgcaggaacaagcgtcatcacagccatggcggtcacgctttgcacaagaagcatcttggcaattccattgaacagcgtcctaaggaggttgaagacagaaaagctccgctgcactgggaaggagatctggttaaaggcgtcagacgcaagaatcagcctgctttaatgactttgactgaaagaaccacacgctttgaagtagttatcaagattcctgactatcgggcaagcacatgccaaaggctgcttcaaaaggagattgacagacatcctgcctggtttaaatcaatcacgtttgacaatggctctgagtttgcggatatgaccaagatcaagggctgccagatttactttgctcacccatattctccatgggaaaggggcaccaatgagaactgcaatggtcttttgcgtcaattcttccctaagggcaagagcatgaaagacaagtcaaaagcttatgttcaacaggcaactgatgccattaaccacaaatatcgccgaatcctccaatatcacacagcagaggaactcttcaagcaatatatctcttcataacctaactgttgcacttaatttgacaattcaggaaattttctattcaaattgagtctgccaattaggatcattatttgccgcaaaacacatggtaatttgttcctcagtatttcgcccaagtgaaagcttcggtaaattatctaatgcaaaataatcacaggcatcagtttcatcgttcggcttaaattcaccactaatttctttgcataagtaaaataccttcgtaatgttggtggccaaaattggtttattatgatgattacgatcttgaactgcaataattttgacgggtctaactactctacctgcttcttcatatgcctctttaacacaattttgtgctgtagtttggtcataatcattccagccgcctggcaatgaccattcctgagtcattttttcacggacaagcaaaattttattatccttaaaaattgctgctcgcgtatcaatcttaggtgtttgatagccctcatcacccaaaaagagtgttttaatttgttctttaggtagtcctgtcctagctgccatcatttcgcctgcaattttacggattttttcatagcgctcacgatcaaatacatcatgaccataatgcaatcctgcttgagctaaactttgtaaatctgtcgcccacttgataaattgatcatctgaattcatttttattgcctttaatataaaattctaagaaaaataacaaattccaaattaataggtaaattgaaatacctattttagattttatcacaagccataagtaacttactcctagtgcaaaaattagtagcaatgttaacagattacgaatactaaatcgacattcactcttgttatatacttgatttacgcgtggtgctagttaaatcgttttagttaataaaaaagtccaatcttgttagactcgacttgtaaatagtaataatagaaaagagtctgatctgattgaactgccttaagcttaagcgttttagccaccatttacaagttagttttaaagatttagtgataatttgtcggcactggtatcgtttgtatgcaccggctgagtttactcatcggcgaaatattgatcaaattaaaactacggacagtctgattttggctttacttatctggcaagctaagacaggaattgaatcacaaagaagattctgtgaatgtttcaattgtttatcacactcacgttttaatcggcgttcacgtcagctattgcaattgatttatcagatacggcaagaaatgaataaaaaggttgacctgaatggacagttcttgatcattgacagctttccggtacctgtttgccaaccaattcgaaactatcgtgctaaaatttttcgcggttatgccaacattggttataaggccaccaagaaaatttacttctatggtttcaaagttcatgccattgttagcgatgacggttacattcttgattatgtcgtaacaaaagcatcagttcatgatgccaaggagacagttgaactgctggaaaatgcccatccatctaattactatcttcttggcgacgaaggctatttaggcaaagaactgcatcaacagctaaaacaaatgggttatgaactttggacaccatatcgtaaaaatatgacaggagctaaaaagcacaatgatcatcaattgatggctattcgcagaacaattgaaagcgacttttcgcttctgacctattacaatgccgagaacaatcgagcacgtagtctgataggctttcaaagccggttggaaattgcaattttagcttataatttggcttattgtctagaaagatttaactagcaccacgcgtacttgatttatagctaatgagaaataatataaggccattgaaaaaataatcaggaaaaacaaaaaagttttatttatgtcatgcacttgtaaatacagtattgctactgttgacaaaaatattgctactacaattgcaatatgactatacattaaaacaaagcctttacttatctgatgatggtcaattaatttatctgataaaactacatagcttgcaaacatcaatactaaagataaaaacaaaaaagcagcataaactaaaggtgtcttactattgaaataacttgtcaaattaacgatagcctcaccaaaggcaataattacgattaaacttactctctctaccaaatgagggaaatttactcgttcagttttaaacatcccttttaaaaacaatggcaaaataaaaccaacaatataaccacttatacaaaaataaattccaacagggtagccgatgattaatcctacaataattaagataaattctattcctaaaatgattaaaaaggcttgtttatcattattatctgcttttacaaatagatactgacaaaataaaattaagatcataacagccattgcaatattaaaatagtgaaaagtaacttgccattcagtattaatattgttagccagataaactgctacaaacatatttaaacctaaaccgccaatatctaaaaattgatttttgctatatcggttaaaatagataacttgataaagccaaatttgcattactacaattacaaccaataaaaattgaagaaaagtaactaaaggtatactgccattaacaggatgatgaatcattgcagtaattcgagaaattgcgtatacaaaaactaaatcatagaataattcaaacattcccacaggcttagcgattatttttttcatactattccctcctcgtattatataaattaaatcagtgataatgattattcttttagtttgtttattcgatcatcagatgctagtctctaattgtcattgaccttggtcaattggtataggttgtttccttctgtagctttgactacttttttagtctgccgcccaagcagttttactaatgacttactcacatgctgtatcgattctggctattactgattcagagcagattcagtcgcagctttttagcttgaacctatgaatacttatattttgcgagattgtcttagaatctgtaattagggactaacatgtgatgatcgatctatgaccaaatatttgctagaaaggaggccattctcaatgaaactttttatcggaattgacgttagttcaaaagatcttcaagtcgctattactgactcagaaaattatcaaaaacctttacttaaccaatctttttctaatgacctgattggtgctaatgaggtcaaaaagataattcttcaacttgctaaacagaacagctatgacaaagtaattatcggcatggaagccacttcaatctatagctttcaccctgcttatttctttgccaatgacgaagatttacaaaaaattaatcttgaaactgatgtcattaatcctaaaaacactaaacgatttcatgacgtttacgaagaaaataagaatgatcctactgatgcctattacatcgctgaatacttacgctttggtaaataccatgtcactattgctcggcaagaggaatacttagctttacagcgtttaactagagctagatatgaaatcacatcttcgctcactagagctaagcagcacttcattgaaactctttattatcgtgtaaacaaactagttaccgttgacaaagacaatattaaaacttctatctttggcgcaacgatgctgtcaattgttactgatagtaaaaccatcgatgaaatcgctgaaatgccaatcgaggatctaattgactaccttcaaaccaaaggacgtggccgcttctctgatccagagactttagctaaagcgatcagaaaagccgttagaggatcatatcgcttaggtaaagtcatgaaagactcgattgatgccgtattatctgtttactatgccgaaattaaaactaatcagaaattgattaagaacttagataaagcaattacagatatcgtccaaacgcttcctgaagagagaatactacaatctattccaggaattgggtcagtttattccgctggtattatcgctgaaatcggcagtattgatcgctttgacactgaagcacagctagctaaatacgctggtctagcttggcgtcaaaagcaatctagtaattttgatagcgaacacaaaccgatgactaaaaacggaaatcattatctaagatattatttggttgaagctgccaacctgattagacaaagagatcccgtttttcggaagtactatcaaaagaaatacgatgaagctttctattctccgcataaacgcgcttgcgttctttgtgcaagaaaattaaccaggaccattttcactctgctcaaaaatggtcaaatctatcaaacaccgaggtgattaattggtctaaaacatttttggaggagtaaataatagttgttaaaaaatcccttgaaatagggcttagtttcatgcacgcaaattttggttttaaaacaaactaattaaaaataaaatttaacttttacattgacttattaccacatgactaatatttgattgctgtttatcatactttatatttgtccaaaaagcaaaatatgatattaatttataagaatcgaaactgtcaaatcttttgtgtaaatagttctttctcgtaaattgattttttaattatttatttaatcaaagtaggattctaaggtgtcctgaacctgaccaaagcctttatgaattcgattgaaataacggtcattgtagctcattgcctgaataccaataaaagcatcaagcgactgttcagttggaaactctgccttaggcttagctttgcgcttgatcacattgttaaatgattcaatcatgttagtcgaataaattgaagctctgatctgcttgggatagttataaaagaccagcagatctggttctatgtctttcaagcttctgataacatggctgtaaaccttgccccatttggtatagaagtcatgcaggacagctgtggcttcttctttgtttgtctgttgatgcacctgtttgaattcgttcatgatcttttcacgatcgtcgacgcgtactttagcgcagatattgcgcatgacatgaaccaaacagcgttgaaaatgagctttaggataagtcctggccaaggctgttttcatgccaacaacaccatcagaaagaaagagttcaacttgcttcaagcctctggacttcatgttttgaagcatctctgtccagacttcaatgttctcactaggagcaatgcagtagtcaatgacttccttatgtccattaggtttaatgccaatggcaatatagactgcttcacgctcaaacgtttctcggcgcaaaggaaggtatgtcgcatccaaatagacgcagaaaaacttgtcgcttagcttgcgtttgtggtaagcctcaacctttggaatcatctgcttggaaatatttgatacctgagctggactgtaatggctgccatacatcttttcaattagatcggctatttccctggtggtcacgcccttggagtaaagcttgataatcatgctttccaagatatccgagtgctgcttgtagtcaggcagcgtgtgctgatgaaattgaccgttgcgatcccgaggcacttgcacttcaattgggccaaattgcgtatcaactttgcggaaataagcaccatttctagagttgccagtattccagccatttctggcatagggatcatagcctagaaaggcagtcaattcagcttctagcaagttattaacagcctgttgtagctctttgcgcaataaatcatttattttgtctggattgaatagagcttgagcaaaatctttggtaaaatcattcatgaaggagttcttctttctgtatgtgttttttttgttcaaaccaatcatacgagaaaggaactcctttttctaatgtttaaagaaataaatttaaggaatcattcatccttacacaaactattttacagtctctaagaatcagtttttagcttgattgtgaaaaattatgctaaagtaattattgattaataaattaatttaattggaggaatagccatgccacgaaatcccagaagacacaatcttaatcaattctcagaccaagaaaaagataaattaaaaaatgtcaaaaaagaattagctgaggcccaaaagaaagagcctgaaagtctacaagcctttaacgatggagtgatggccattattattacaattattgttttagaaattcaacctgctctgcatgaaattcattatcagcaattcattagcaatattgctgtctttttaatcactttttttattgtggcagatttctggtatgatctacatttatctttttcatactatattttcaagccttcaaaagcgattgctattctagacttcttttttttagctgatttatcacttctgccagtcatgactaaatggattatggctgaaaattcttctttcgctgtagctaacttgggaattgtttttttaattgccaaaatcttagaatatctaattccctgaattgtcaaattaagtgcaacagttaggttatgaagagatatattgcttgaagagttcctctgctgtgtgatattggaggattcggcgatatttgtggttaatggcatcagttgcctgttgaacataagcttttgacttgtctttcatgctcttgcccttagggaagaattgacgcaaaagaccattgcagttctcattggtgcccctttcccatggagaatatgggtgagcaaagtaaatctggcagcccttgatcttggtcatatccgcaaactcagagccattgtcaaacgtgattgatttaaaccaggcaggatgtctgtcaatctccttttgaagcagcctttggcatgtgcttgcccgatagtcaggaatcttgataactacttcaaagcgtgtggttctttcagtcaaagtcattaaagcaggctgattcttgcgtctgacgcctttaaccagatctccttcccagtgcagcggagcttttctgtcttcaatctctttaggacgctgttcaatggaattgccaagatgcttcttgtgcaaagcgtgaccgccatggctgtgatgacgcttgttcctgcgtcttttgagcttcataggcagatcaatattgcttatgtccagcaagccctgatcaatatagcgatagacggttggtgtgctgggacaagggtagcctggcatagtccttttgaattcaccaacgaactcatcgatgctggtggcatcaaatttagctttaaagcgtctggagagcattctcaaaaagacagcataatgcttcaatggattgcgctgatagcagtttttgcgacgcttctcataataaatctgtgcagtatcagcgtaatagtgctcatacaataaatagctgctgtctctttgcaggacacttccgcgtttgatttcgcgactgattgtcgacttatggcagccgacttcttgagcgataacagtacgggaagttatgccggaatccagcattgcttgaatttgtccacgttgtacgctggttaattgatgatagtgcttagaaatgctagaatttgaattggtcataaagatcttcctttcttgatttttcgtcacttcaagtttaggtcttcatggcctttttgtttaacacttagtgttgcacttcaattttaaatccgggtcatttctttttccagttaaacgcaacaaaattatgtgatttttatttaaaagagcgccagtaaacttaaactaaatctactggcgctcttttgttacttttcttgttccttacaatgactcttgcaaacacattctttactatttaccattttgcagtggcaaatgccatccttatctgcacaaggacaatttttctgacatttcatttcatcgtgacaaaattcatttttcatgtttatcatctctatattattatgcctatgataatcgaactttccaaccaatatatcttataattttacttttcctaataagattattttatagaaatatctagttaatttgttaatttaatctgctgatcagctaccgatgtaatgaagtaaggatcatgctcaattagtaacatcgttggcttcacactcttaagaagcttaattaattgatcttgattgaatacatctaaataatttgctggctcatcccataaatataaattagcaggttctgtcaatgacttagccaaagctactcgtttctgttgtcccatactcattttttcaattctagttgtaaaatcagcacgcgcaaatcccattttcttaagattgctcaacaaagcttcataagacaaatgatattttttagcaaagtcttttaatgatccgctatacattacaaattcttgtggtaaataagagattttcaaactttcaattagctcataattacctttggcaattagattttgagagatacccagtaaatgcttaattaatgttgactttccagaaccatttttaccttcaatagcaataatttcatgattattcaaagacaaagtcaagcttttaaatagttctctactattttttagttgcaagctaagatcattaagttgcaaaatctcacgatgataatctgcctgaaaattcatagtcagagtaggaactttttcaatattctttagcattccttctttttccgcaatcctcttatccatgcgattgcgtgcattaatcgacttcttcatcatctttgcagcttgatgtccgatcgctcccttatttaatctggttcgacgattgataatatgctgtgttttcatccctaatttcttacgtgcctctattttagctgcccaattatggaattgtaccttttcttggttcaattttttcacttgccctgtaagctttttatttttttcacgatcaaaatcatctcgcctttttttagttacctcataagtcgaataatttccttgatacaaatgaatcgctgtattttcaatcgctaatatatgatcagttacctgattcaaaaaatctcgatcatgactgactacaatatatccttgatcatgcccatttaaatattctgctacttgtttacgacttgtctcatctagatgattagttggttcatcaattagaggaaaagaatcttgatctgtaaatgataaagctagcaaaattttagtttgctcaccaccactcaaggtattgaaaggctgccataataaatcgggatctaaattcattagagttaactctcgttccagcttccattgttcaaaggcaacctgatcttgtaactcataaaaagtaatgtttttagaattttgaatttttacaggataatatgaaaagctagcattaccttgaatttgaccagttccacaatacttacctcgcagtaagtttaaaaaagtagttttacctcttccgtttcgaccaatcaaacctagtttccaatcagtatcaaggtctaggttaagatttttaaaaatatatctattgctgtcttcatattcaaaagataacctactaatcttaagattactcatccaaccacctcgcacaaaaagagcccatacttctagcaagcatagactctctccttacgaaaatgaattgtaataatcgaaggcctgggctttaatcctgctaaaagtacatagtctctccataatataaattactatttggactatgatgctaattacaagattaaaagcgcaacctaaacccttctttcattgaataatattatgctgtaataatagcacctgttttattcttttacaatagatatattaagtaactctatttattccataaaaacttaattaatgcttgatcaacttgagcattttcatgcagttttgaatgttgtgcatttttgccattaatcttttcaactttataagtactgtcaccatcaccaataatatttaggacttgaacatgctttttcatataaagctctcttacacctgtcatttgctgataagttgagtttatcttattaggctttccattaatattcaatcccattcataaattgcatctatataatttctaataaattgctcatactgcaccttaagttacagtatgagcaaagttaatcctttttttaatgtatttaattttacgaccgatgaatacatattattcactaattagtcctagacgctttcttactcttaatacatgacaaatcaatccaagaattaatcctgcaatcccaaaggtcagccacccaaagcctaaattgaaaaatgggaagtactgttgggcaaaaccaagcagtgtctgtaataatcgactttcatgtaacccagctggtaacgcatttaacatgtcaaagaatgctggaattaaggtaagctcagttgtaatccggtaaacgagccggtcattcttaaacagtggtgaaagtagccctaaaataattaaggtaattgctaacggatagaggaacatcagaattggcgttgaccatgcaataatctggttgagtcctaaattagcaaatagaaatgataatccacaattgattcgtaaaaatgttcgatacgaaattttaggaaaacggcgatggaaatcttgcgagaaggcaattactaatcccattgctgaagtcatacaagtgatagttgctaaagttgctaaaattgcatctccagcagttcctaagtaatggtgtgaaatctgagcaagagtaattccaccatttgctgctaatttaaattgatgcaaactagtcgcgcctagccaaattaaagctaaatagataattgcaactcccgcaattccgagaaaaccactcttagccgttgcaagtgaaatttgccgtgtcttcttaatacctaattctctaattgcagtaataatagtaattccaaaggctaatgctgccaagccatccatagtattgtaaccttgcaaaaagccattggaaaaagcatgccttgcatatgaagcagttatagcagcagtatttctagaacccaatggattaatgaatgctaataagaagataaggaataataataacaagaacaagggatttaaaactttaccgattaaagtagtgatctttccctcatgatttgaaaaaagataaactaaactaaagaaaattgctgagtagattaataatcccaaagtattagttgacttagataaataaggggcaattccaatttcataaggaacagtggctgtccggggagttgcaaatagtggtcccaaagtagcgtgaacaagaattaaaaagataagtgcatagtaacgaccattcggcaatgcaagatcatagatcccattcgacttggtaatactaattgccaacagcgccattaatggcagtaaaacaccagaaagcagaaagccactactcgctattagccaattactacctgctaattgacctaaatgaactggaaaaataagatttcccgctccaaacaacattccgaaaataagtgatgcgataatcattgaccgcctaatactcgcttttttggttttcattttaatattcctttcgataaaaattatattaatactaggtacaaaaaaacgtccttataagcataaagcttataaggacgctatcacgcgtgttaccaccttattttagaataatattactattattcccttaccccatacatagcaaaactagatacgttgacgctataacgggcgcgccctcctaaagttacaattactctcacttcaagcactcataggctactttcactttacttttctatccccactcacactaatttgggttcgctgactagttaaggtaaagctaatttcctattcttagtggttattcataccatttatttagtaagtatattacataataaatttaataaagtcaatattattctaaactattttcccggatttaaaattgaagtgcaacactaagtgttaaacaaaaaggccatgaagacctaaacttgaagtgacgaaaaatcaagaaaggaagatctttatgaccaattcaaattctagcatttctaagcactatcatcaattaaccagcgtacaacgtggacaaattcaagcaatgctggattccggcataacttcccgtactgttatcgctcaagaagtcggctgccataagtcgacaatcagtcgcgaaatcaaacgcggaagtgtcctgcaaagagacagcagctatttattgtatgagcactattacgctgatactgcacagatttattatgagaagcgtcgcaaaaactgctatcagcgcaatccattgaagcattatgctgtctttttgagaatgctctccagacgctttaaagctaaatttgatgccaccagcatcgatgagttcgttggtgaattcaaaaggactatgccaggctacccttgtcccagcacaccaaccgtctatcgctatattgatcagggcttgctggacataagcaatattgatctgcctatgaagctcaaaagacgcaggaacaagcgtcatcacagccatggcggtcacgctttgcacaagaagcatcttggcaattccattgaacagcgtcctaaagagattgaagacagaaaagctccgctgcactgggaaggagatctggttaaaggcgtcagacgcaagaatcagcctgctttaatgactttgactgaaagaaccacacgctttgaagtagttatcaagattcctgactatcgggcaagcacatgccaaaggctgcttcaaaaggagattgacagacatcctgcctggtttaaatcaatcacgtttgacaatggctctgagtttgcggatatgaccaagatcaagggctgccagatttactttgctcacccatattctccatgggaaaggggcaccaatgagaactgcaatggtcttttgcgtcaattcttccctaagggcaagagcatgaaagacaagtcaaaagcttatgttcaacaggcaactgatgccattaaccacaaatatcgccgaatcctccaatatcacacagcagaggaactcttcaagcaatatatctcttcataacctaactgttgcacttaatttgacaattcaggttctaaactatttttaattttatacttttcgttttgacatcaattggtttcgaatgtatctgcgaaatgcttcatcaccaagtttttgacgcttttcatataattctttggtaatcttaccagtaacataacacatccgatcacgatccttatcagtgacagccttaaagatatcttgagccacttcctcaggcgattctaaactatctgtgtctggcattaacatttttgtttgattttttagtaactgatcaaatcccggcattgcgaatgtctccatcttaaaaccggttttcacaacccctggaacaatgattttcacctgaatgccaaatggcgctaactcatgataaagcatttcacatactccagtcaccgcccacttatctgctgcataaataccatctagagctaatcccatttctccagcaagggaagtagtagtcaaaattaacccacttttcttttttttgaaatatgggataaatttttgggtgacacggatcattcccagcaggttcgtgtttaaggactgctgcatggcttcttcggtcatgtcctcaaagcgagacttcatcccataaccagcattattgaacaaaacatccacctcatgctttttaagaacttccgagactgtctgagaaatttgttcaggcttcgttacatcaagtggataaataaaaacattttgataggatgttaattcggtctctttttcaggtgaacgcatagtagcaatcaccgttcaccctttttctgcaaataattttgctgttgctttgccaattccggatgacgaaccaacgataaaaattgtactcatattcactacactccttatcttaagatggacgattaaattattcactgacgataattaatgacttgattgcttcacgtttatccatcacttcatatgcctgttgaattttgtcaagactaaaacgcttagtaaagacttttcctggatgaattttaccttttaatacagcatcaagaagaatcgcacgatcataagtagtgacggaagcaattcctccgcgaagaccaatgttcttccagaaaagcgtgtttgatgatggttcggtttgtggaacacctactcgaccaacaattgcgcctggacgagctaacttgccagcttgttcaatagcagatacggccccaacacattcaagaaccttcttaactgcatcatcaccacgtaatttagcaccgattacaccacaaaggccaacagcaccatccccgataactgcgaccgtatcgtcttccttggcttcagcacttgcagccgcatggtaaccagttgccatcacatcagctaaagttaaaagatcgtttaattgctcgtccgtgtaatctgaggggtgacctggaatctttactaatgcccagttagcattagtaaaacgaagatattcaccttggtaaccaccattactgccagcttcttggttaacacagttgccatcgaaaccagctaaacaagctacgcagtgaccacaaccatgagtaaatggtgcaattacaaaatcaccaggcttaatatctttaacgttatcgccaacttcttcaacaattgcaattgcttcgtgtccaactaatgatcctttttcacgattagtaatcccacgataccaccataagtcggacccacatacacaagcacgaacaatctttaaaatcgcatctgttggcttttggattattggcttttcaacctcatgaacttccatcttaccagattccataaatacagctgctttcatctaaattcgctcctctaattatttttacattgtattaactcaaactgtaaaccttaaagtccactacaaggcaagtaaaaatttaactcggcttattaatgccaatactttcgcaggaataaagctcatcatcgttaagtaattttgtaaccaaatcaacgattgattttattgaaacatcgggaccaccaaatggttcgcccttatgagtaatttcataattaactggaccaccagtaaaccagccgggacgaataacggtatagtttaaattagacgcttccacgatgtcagcagcgtcccgatatgattgaagaattgggttgctttccaaattactactaataccaattgaagcaggaatctcattataaattcccatcgaactaataaatatcaatcgtgatatgttattacggtccatcgccgcaataatctgcttagcataggcaactaagtcaccgcttaatgctgcaaacaccgcatcctgtcctaccaacgctttgtctaaatcgtgatcatttaatacatccccactgattacagtttctcgttgaggatcaataacattaattcgattggctgaccgcgcaaataatgttaagtgattgtccgtttcatttaatactgtttgagtggttgtagtccccaatgctcctgttgctccaataattaaaatattcttcataacatttgacctcctttaataagtgctggcgatctgcttagtgatcgcccatttaccgttaatcttcgcaaattccatcttcatttgaagcaacaatgtacttactgggcttccccaaacgctagctttaactttattgtgaccaattaagctagcgtgattcccagcaatctgaatgtctgagatctgctcctcatcagaagaataatacttaagctcaccattttggatttgatcgatccattctagtttgggctgagcatacccagtcatgtggtgtaataccatggttgaatctaaaatctgacccaaggtttcaatgtctttatctacgattgcccgattttcctggcggtaaaggtcaataattacctctttatctgtcatcaaatcgtcctttgctaataactgttccatcaaagccttatcaaaaccagtttttctctttttgctttgattaattgtctatatcataacgatcttcaataactaaaccaattcacatttacaattaataatcataagtaaaacttatcaagctaaattcttatatacacaaaaacgccaaaaattagtgaagaagcttctttttgacgtttatttttacctcatagtctatttcttaaaattgtttctttaatagctcagcaaacttttcaatgtaaaagcctgaattatcttgtttccaatatgtatagtaattttgttgaaggggaatatcaccggcataaagcggaattgtcttaacagtttctttattaatcatcgcttgagttcgtttattaacaataaagtacttaaacttcccacatcaaataagctggcaattctttgatattgcttagctttgggcttctatactatttttgctagttttctttaacaatttttgcatgtatttgggtaaacgattgataaagtcagccgtgaattctgctatttgtgcttcactggcatgaaagactttttcaacgctagccaccattgcttttgtgattagctgaagtgaatgactgaatgtaatatccgccagctcatcaatcatgcaatagaaaagctcacctaaggttcgctcatcttcgtcgtcccgcttggctactgacatgagcatatagcgggtaaagactatagccacatgagcagtcaaggcatcgtaggacagaccatgatattccgtgcttagttttaggtagcttttgcaggttttgaaaaaaacttcaatatcccagcgtttgccataattgcgaatgacttcatcttcgctaagcgacatgtcggtacaaataatagccagccactctttacgattggcacggtttctaacgcaaattatccgagcgtcaattttagcaccgtctttgtcttggcggccaaccttgactggaattgacaacagatagcgcgaacgcccgcgtcgctttttacagctacgataaatctgtttgatgtttttgcgttctccttcaaattcatatttgattttggagctaactttaaccatggcaattacatccagcttcctttgcttgagctggacgatttgatgtggatttgagaaccagctgtcaaacagcacgtacttggcttgatgacctgctttcatagcttggtcgattaaattaaccatcacgtctgtgcctttagtccgggcaagcatgcgtcttttgccagcaatggtgcgctgatcacagactttgttttcgccaatcatattctgtagcttgtgagaggacagcaacaccgaattgattggcatgaaagaagctccatcagtccagcccagggtcatcatgcgaaaacctttcttgtaagtcattgatacatggtcaaaaactttggcgactaattctgttttcttgaagccggtcctagagaagtaggaatcatcgacaacaaagcaatcagcccgtttttctgaagtcaaagatcgcaagtgattattaatgatttgcgcagaaagcagtgtggtgaagtggagccaattgacgtggacgttgcgcataaatcggtaataagaatttttagaaaagctttctttaaaatgatccgttttcagctgcatatataagctgcggtcacgaaagacattgcttaaaacgtaaagaaacaagctgaacaggctaatgcctttttccttgcggaagccacattttctcaacagcttgatcacctgaaacttcttgatgaagctgatgattgagtttgaaaatagttgttcatttttttggtcaggagatggtaaaatagacattggcacaagcctttcatgcatagaattatcgtttggtcactttaattatagcaatgaaaaggtcatgtgccttttatatttgttaaaaaacgcagaatcacaataaaaggagcgattctgcgtgtgggaagtttaagtaaagtacccctgattggctgctaccattatttgagcctcatcgatagtagtaaccgttaaaaaccggctttttattcctaaagcatcccgataatattgttcctcagccgctttttgtgtttcattaacaattaaaatgcatgataagtcagctaattgcgttgctaaaatacggttattatctggatagttcaatggtaaaactaccataaaatcagtttcagttaagaattcattgtggtattcgtttgataaagcacgccgctgatcggagaaagccagatcaattctatcatgttttaataactcaaataactgttcatgagttccgcttttgattttaacctcgacttctggatacatttgcgaaaaatgggcaacagtatgcaaaaattcgttagtaccaaaattcgataaatagcctaaacgtaattcataattgattggtaatttaccaattttttgtgtctgatcaattaattcattagttgttttaacaacttctttggcgtgttggtagaagaattcaccagctgccgtcagttcaaaacttcttccctttcggtcaaacaatttaacatcaagcatattttcaagctccttgatttgctgggaaatggctgactgggaaatattattttcttcggcggcgcgggtaaaattatgtcgatcaaccaccgcaataaaatacttcatctgttgaaacatttacttatcctctcaatttgatttggaattactaaacaaagcaacgatgctcaatatactttgccccttcacgaattgacaacggtgccaactcttgctgattttactcaataaaatcacgaaccatgatttcgcatatatttttcatttgtctagcacattcagggttagcattgtgagcaaaccgttctttcaattgtctataatcaagcatctattcggctccacagcttttttactactatcttatcagatgtttattctcatcaagcatttcttttttctttaattcataatattcttcttcatctaaaaatgacatcacatggttttcaaagtggtcaaacttgtaggctagataattccaagttcattccgttttgcaagtaggataaagcctgtttaacgagaaccaattactaatattgaaaatatttaattttttgcttgactataaatgaatgatcgttcattatacaaatatgcgatacaaagatgaacacaaaaaagaagctatttatgaagcaacaattctacttctaaataaagaaggtttttcatcaacatcaatgtcgaaaattgctaaacatgccggtgtttcagcttcaacaatttatatttattttaagaataaagatgatatgttgaaaaaattgtatttagatactaagaaaaaaatgagcgccaaaatgtttactgatacaacaaatgatgatgctaagtctagcctagctaaggttattcgtaactatattgattttattttagataatcaggatgcttttctctttttgcaacaattcactaactcgccttatatgactgaattagatgagcgcgaagcaagcacctattttactccaatgtatcaattagttaaaaaaggccaagaggagggaacttttaaagatgtagacgctaatttattatttgcctacattgagccaccaattaccgaattagctaagcgtcatttcaaaggagaaatagattttactgaagaaagaattgatgtattaattaacttagcttggagtgctattaaaaagtagcactttaatttttattattacagtgaacgatcattcgtttattataataaaatcaagtgtttacttaatcgtaaccaaaataagcaacaataaatgaacggagactacaactatgcaaaagaaagtaacttttaaaaacaacgaacacgacatgtctggtatcttattctttccagataattttgatgaaaacaagcaataccctgctttctcaatcgcatctcccgctggtgcagttaaggaacaaattgcaactaattatgactcacggttagcaaagtatggctttattgccctagcatttgatacttcacatcaaggtgaaagcggtggcaaccctcgtcaattagaagctccttatgaacgtgtggaagacataaaatgcgctatcgattatttaacaactttgccatacattgacaataatcgtttaggtcagttaggtatttgtgctggcggtggctactcaatgcatacagctatgaccgaccgaagaattaaagctgttgtagctgtaagtatgagcgatccagcatcatggattcgtgacggttttgacggaaaaacctcagttgaaactcaattagccttacttgaagaagcttctaatcaaagaactcgtgaagctaatggtgctgagccaatttatggaactttcgttccagaagaagtaactgaagggatgcctaatactttagtagaagctcatgaatattatcgtaccccacgtgttcaacatcctcgttcaactaacaaggtatcaatgatgtcaattgataaaatgactgacttctccactttcttgtttgctgatcgctactcaactcaaccaattttgatgattgcgggtagcaacgctgacactttccgtttctcagaagatctgctcaaaaaagcagcttcaactaacaaagaactattcactattgaaggtgctactcacggtgatctatatgataaacccgaatacgttgatcaagcagttgaaaaagctgccgctttcttcaaagaaaatctttaaacatattaatgtgaagcgacttaaaatgaataaacaaatagtctacttttcaaacagtggcaataatgagcgtttagctaaaagaattgctcattattatggggttaatgcaacacctattattccagttaatccgtatcctaataaatatcatgagttaacttcacaggcaaaaatagaacgttttcggcacattaatgttgctattaaaccagttaaacttgaatcaaatatcaatactctaatcttagtatcaccaatttggtatgcagatttgccacgccccgtggtcacttttctgaaacaggttcagagatcttttcaacatgttgtttttgtcagtgacaagttcatgataggttttggtatttgcaagcgaacattaaaaaaatatttatcaaagcaaacaactattgatttaatagcagccaacagtaataacttttcattagttaaacaatactttcaaaaataaaaaaaactcttaaagattgacgtgtagagttctgtcttctttaagaggctttttttgtgtttgcttcacgataaatactttgaataaggctttctagtaaatcattgccaaatatacaactatccaattatttttttacctgaattgtcaaattaagtgcaacagttaggctatgaggaaatatattgcttgaagagttcttctgctgtgtgatattggaggattcggcgatatttgtggttaatggcatcagttgcctgttgaacataagcttttgacttgtctttcatgctcttgcccttagggaagaattgacgcaaaagaccattgcagttctcattggtgcccctttcccatggagaatatgggtgagcaaagtaaatctggcagcccttgatcttggtcatatccgcaaactcagagccattgtcaaacgtgattgatttaaaccaggcaggatgtctgtcaatctccttttgaagcagcctttggcatgtgcttgcccgatagtcaggaatcttgataactacttcaaagcgtgtggttctttcagtcaaagtcattaaagcaggctgattcttgcgtctgacgcctttaaccagatctccttcccagtgcagcggagcttttctgtcttcaatctctttaggacgctgttcaatggaattgccaagatgcttcttgtgcaaagcgtgaccgccatggctgtgatgacgcttgttcctgcgtcttttgagcttcataggcagatcaatattgcttatgtccagcaagccctgatcaatatagcgatagacagttggtgtgctgggacaagggtagcctggcatagtccttttgaattcaccaacgaactcatcgatgctggtggcatcaaatttagctttaaagcgtctggagagcattctcaaaaagacagcataatgcttcaatggattgcgctgatagcagtttttgcgacgcttctcataataaatctgtgcagtatcagcgtaatagtgctcatacaataaatagctgctgtctctttgcaggacacttccgcgtttgatttcgcgactgattgtcgacttatggcagccgacttcttgagcgataacagtacgggaagttatgccggaatccagcattgcttgaatttgtccacgttgtacgctggttaattgatgatagtgcttagaaatgctagaatttgaattggtcataaagatcttcctttcttgatttttcgtcacttcaagtttaggtcttcatggcctttttgtttaacacttagtgttgcacttcaattttaaatccgggaattatttttttagttaaatttgatgtaatatcagacaataaagaaatttttcctactccacgcatcccgtaaataatcgatatttgataacatcttcaaatgattcaactacattttcgactactttgtttctccctaaatatatttggggaactttaccaaagttagtatcaaatagatttttggcttctatagtttttcctccattttaaatttcttcagattttttgattttattttagatctaattacataataaaaagtaagctattacacttgctaaaatgaaatctaaactatttattacattgcttctcctattatgaaatgcttttaatgtctaattttgcttttttccatatcccagcaggtccaagccagcaataaaataatcagtacaataatagcataagcgaaaatcttggcatcttgtttaggcattatattaaatgaaacaaaggttgccggcaaattatataagttcaagaaaattaaaataatcgagctgatccagcctaagaccgaccagcttctcctatttttgaattgccccatcattcttttatcatcagtcataattaataatggaacaatcgaaaatgggacagcaaaagctaagaagacttgtgaattttctaaaagcatgttgagagcaaagtgctgctgagaaattgtgtcgttagctgtcataacaacgcaaatgataactggaattacggataatagccgagtaaataatcgtctcgcccaaagtggcatcttcaagtgaatgaagccttccattacaatctgaccagttaaagtccctgtaatagtagaattttgtcctgaagcaagaagtgctatggcaaagagaactgataaaattccagttttagctactgaaatcaaaattggattacttagcattgcagtattgcttaaagcatcataaagtccaaaaaatgaactatctttaaccgctccacttttaaaaacagctgctcccataattagcaaaagcacgttaacaaagaatgctagaataagttgaatatttgaatcccaagtagtaaaacgaactgcatttttgacatcatctggatcatgatgatttatctttcttgtttggcaaattgaagaatgcaaataaaagttatgcggcatcacagtggcaccaataatacctaaactacctgttaacggggaaagcccattaaccacgggatgttgtgcaactagttcgggactcggaaaaacagacaagaagatcttactccaattgggctctgctaacatgacttgataggcaaaaacaaataaaatcaccataatcaaacatgaaatcaaagcctctatttttctgaaaccaacctttgacaataataatagtagaaacacatcaaaaatagtgataaatgttgctataactagtggaattttaaataaaaggtttaaggcaatagctgcaccaataacttccgccacatctgttgccataattgctaattcaattacaatccaaagaataaagctcaatctcttactagttctagcacgaattgcctgcgctaaatccatttgcgtaacaattcctaatttagccgacatatattgcaacagcatggccattaaactggaaattaaaatagtagaaatcagtaaaaagttaaagctctgtccaccattgattgaagcagcccaattgcctgggtccatataacctacagcaactaatgcgccaggtcccgtataagcaaaaagcattctaaagaaattcttagttttaggaaccgcaatcgtactattaatctcagctagcgatttaccattagcatatgaaataaaactatgattttccatcaatggtgctcctatccatggattcctagtgtcattcgagcaatacgcgacatcatatttggattccattgcggataccagaccagtttaatttgacaatcatcgatttccgcaacgctctctgctgccttggtaatttcgttattcagccattcactcaaaggacatcccataatagttagtgtcatcgtaatctggcaaagatgatcatttacctcaatgccataaatcaagcctaagtcaacaatatcaacttgcaattctggatcaattacatcttttaatgcctggtaaacatctttttcttgatcagataaattttctatttctaacattaaccaattgctccttccatttggaagctgatcaatcgattaagctcaacagcgtattccattggcagctgcttggtgaacggttcaacaaatcccataataatcatttcagtggcttttctttctgaaataccgcgactttccaaataatacaattgatcttcagaaattttagaaactgttgcctcatgttccatcgccacatttgagttttcaatcgcattagttgggatggtatctgaagatgattgatcatccataataatcgtgtcacattcaacatgcgccttagaaccgtccgactttttagaaaacttaacacttcctcgataatcagttgagccaccgcctttggcaattgacttagaaacaattgagctagaagtgttaggggcattatgaaacatccctgctccagaatcttgatgaatcccgtggtgtgccactgcaatcgaaagcatggtaccacgtgctccttcaccatttagataaacgctcggatatttcatggtcaccttggcacctaaatttccgtcaacccattccatcgtagcatgcttgccagcaacggctcttttagtttccaaactataaacattatcagaccagttttggatagttgtataacggcaatatgcattgtccaacacatttacttcaaccacagccgcatgaagagagtcagatgaatattgtggtgcagtacatccctcaacataatcaaggtgtgcatcttgatcaacgataatcaaagttctttcgaattgaccagaattttccgcatttaatctaaagtaagcttgaacaggtgcagggacttgaactcccttaggtacataaataaaagtgccacctgaccaaacagcacagtttaaggcagaaaacttatttaaatcaattggaactaatttgccaaaatatttttttaataaatctggatattcctgcaatgcagtatcagtatctgtaaagataatccctaatttatcaaattgctctttcatcttgtgataaaccatctcagattcatactgggcagctgaaccagctaaatattttctttctgcttgtggtacacctaagcgttcaaaagtatccttaatatcctgtggtacatcattccaatcacgatattttttatcagtcattttttgataataaagcatatcatctaagtctaaacccgaaagatcaggaccaaaactaggcattggcattttttcataaatatggaaggcctttaatcgataatctaacatccacttgggctcatgcttttcagccgaaatttgtctaattacatcttctgttaaaccatgtcccgttgaaaattttggttttacattatcatgaaagccgaattgataatcttcatctttaactatttcttctgctttagtcattatcctcatcctcgttttctttaccaagtaatgctcgatctaatccccaccaagccaaggtggcacatttaatccgcgccgggaattccataatacttatcaagacttgagcgtcttctagtttttgcatgtcttgttcactacgttttttgccagctgctaagtctgaaaatatcctagaaaaactaatagcctgttcaatattttttccttttaccaattgggtcatcatactagctgaagccttactaatagtgcatccttccccatcaaaagcaatatctttaatttgatcattctcaaccaaaatagttaagtgaatcttatcaccacaagttggattataaacagtcgtttcattagtataattagcaagttgtccaaaattgcgtggagtttgagcatgatcgagaataactgctttatacaaactttttaatttatctaagctcaccgaaaaactcctttgcttcttgaattgaactaaccaattgatcaatatcattttttgtattatagattgagaaactagcacgtacagttgattctgtcttaaggctttccatcaatggttgtgcgcaatgatgccctgctctaacttctacaccatttaaatcaagtgctgttgctaaatcatgtggatgaatttttcttaaattaaaagaaatcacaccagtacgattactgcagtcttttggaccatacaccactaagtcatctatttttgataattcttttaaagcatatgctgttaaactatcctcatgtttttgaattaaagttaaatctaactttcctaaataatctattgcggcacctacgccgatcacgccagaaatattcggagttcctgcttcaaacttttgaggcacaggtgcccaggtagctccttttctagttacatttgtaatcatttcaccaccaaaacgataaggcggcatttgttctaacagagcttttttgccataaagcacacctactccagttggcgcaaacattttatgtcctgaaaatgcataaaagtcagcatctaaatcagtcacattaaccggaaagtgtccgacggcttgagcgccatctactacaacaatcgcgccatttttatgagctaagcttgttaaagccgcaataggattaattgtccccaaaacattgcttacatgagtaatcgctacaattttagtttttgtagtaattttactttttgcatcttccagatctaaacgaccattagcatcaatttcaataaactttaacttagcgttctttcttaaagcaatctgctgccaaggcaaaaaattgctatgatgttccataattgaaacaacaatttcatccccagcttggatattttgctcaccataagttgccgcaactaagttcaaactatctgtgcaaccactagtaaatacaacttcacttgcatttttggcaccaataaagtcagctactttttgacgggcattttcatatttttgtgtagcccttagccctaaagtatgaacaccgcggtgaacattagcgcgatcaaaattagtaaaatgttcaatctgtttttctacaactaacggcatttgactagttgctgcattatcaagatagatcaatttttcatcattaattttttgattaagaattggaaaatctgctttaattttcttaacgtctagtttgtccatcaattaattttttttccaaaatatcaatcatcttttgccgaacttccttattaggaattgcatcaagaacagcccctaagaacccgcgaattaccaatctttgagcttgatcatatggaataccacgactcattaaataattcatttgaatttgatcaacaggacccacactagccgcatgagcagcaataacatcattttcatcaattaaaagcagtgggttggcatctccatgtgcattatcagacatcattaaaactctattttgttgatcagccttagagccatgtgcaccatgaacaatctgaccaattccattaaaaattagttgagaattttcaagtaaaacaccacgttgatttatcaaaccagttgaatgtggcccgcggttggttactcggttgttaataccgactctttgatcaccagttgtaactgcaattgccttagaatccgcataactgccttcgccaattaattctgaatccaaatcgcctaaggtgttgcagtcattcataaaagcaattgcccattcaacatgtgcatcattttcaattcttgcacggcgattaaagtaaagcgttgtatccttatccatttcatcaagggatgaaaattcaacatgactacctggatgtgcaacgatttccaccattaagtttgcggatttaactgctttatcctcattttgaatttcttccaagaatttcacttgactgttatcctccgtaacaatcaataaatgtgaaatatatggatcttgcgtagggttcaaagtaactgtaattggttcggctaaaactgtatttttaggaatataaagaaataagcctgaatttaaatacgcataatgataagccgttaatttatcttcatcatttttaataacggaagctaatgcggatttaactaaatctggatattgctttattgctgtaaaaagatcgcataagatgattcccttatcgttaagaagatcatgattctctttttttataaaaaagtcaggttggttttgccacttaaaatcttctttagcaatcaacggccaatcttgataggaaaaacgctgcattttgggataagaaagtttatgcatcttttcaaaagaactagtccttaaatcagttaaccaggaaggctcgttgttttcctttgatgagacaagtatgttttctttgctcaacatttgacgttttcccccctaattttcatcaactaacttaatatgtaacccaagttcatcgcgaagacctgcatatccttctttttcaagttttttagctaaatctggtccaccgtctttaacaatacgtccatccatcatgacatgaaccacgtcaggcacaatataatcaagcaaacgctggtagtgtgtaatcattaaagcaccaaagttgtcaccgcgcatggcattaactccccgtgatacaactcttaaggcatcaatatctagacctgagtcgatttcatcaagaatgccaaaacttggtttaatcattaacatctgcaaaatttcgttacgtttcttttcaccgccagaaaagccctcattcagataacgctcggtcatggcttccttcatatctagcaaatccagatttttatctaattcattcaaaaaagtcatcactgaaatcggatcatcttttggtcggcgagcattaattgctacccgcaaaaattcagcattagtcacgccaggaacttctgctggatactgcatagctaaaaataatccttttctagcgcgttcatcaactggcatgttaataatgctttcaccgtttagcaaaatatcgccttgcgttatgtgatagcgaggattccccatgatagtctcagataaagttgattttcctgttccattaggtcccataattgcatgaatttcacctgtcttgagagttaggttcacgcctttaagaatctttttactcgtttttttatctttgtcttcaacttctacatgtaaatccttgatctctaaagttgccatttaaatcctctttttctacatttggtattgctgcttaactatcagatacaacatatagataatataacgcaaaaaaaattttattttcagtcttgacttttaacctaacatgtttgcgtagtcatgaactggcacttgaagtgttaaatcagaaattggaaatgtaacacaagtgttgacatagttgtattcactatcggctgcacgacgtccaggaaatggaataaatacttttccattaactactcttgaacgacatgcaccacaaacgcctgagcgacatgatgaaggggcaataatacctgctctttccattgccaccagcaaactttcatcacttcttgctggaataacttgtatttgatcacgggttttaactgtcatgttgaaagtcttattctttgcttcctcaggataattcttgaaaaagtatggatttactgaaccggacatttcttgtcttacttgccctggacgaagatctaactttttaatttcttgatttacaaaatgaatcatcgcagctggaccactcatataaatagaataattcttatctgctggagcatatttttcaatgatggcctgattgataaagccatgttcatatccttctacttcttcatcacttaatatgttaacgaccttgaccttatcagttttggcagcaattctatctaattcatcacccaacaaaatatggttgtgcgttctacttccatataaaataatcaaatttgcatcaattgtgccatcagcaattgcaccagccattgagtaaaatggtgtaataccgctgccaccagcaataatggtcttcttgtctcttaatggttcatagaataattgaccagcaggacccgaagcagctacttcagtgccaaccttccaattctcccaaatataaggagttacatacccatttttgactaacttaattgtgagcatatattcgccagaaagcgcctgcttaggtgtgcttgaaatggcataagcacgtgtacaataacttttaccaatatgaagttttaaagaaatatattgacctgcttggaaatatgcaagtttgctggtaccttttgattcatctggtacaaatacaaagctcttagcatcgtcacggtcaataatcttagtgattttcaaatattgcgtttcaggatgaagctcctcttcaagaatgttcatcggatattttttaggcaactctgcatccgaagcattttgaatttcatgttttcgctcattttgaagcttctttaaatcaataattcccttaatctcttcaaatttattcatgatctgctcccatattattaatatcactaacagctatttttgctgcagttaaaccagtagtgtatgaaacattgtaaccatcacacataaatccatgaccaccgcagaaatataaatgtggcagtggatttacaacgttctttaaatccattgatctaccaataatttgatcccatggtgcacaatgatagccataaatttcaccatcaggtgttcccatatagcgagcaaatgttggtggtgcagcaattgcaatctcttctatagaatcactaattttaatacctgttgcctgttcatactcatcaatagcatttttagctattttaactttaagtttttcataatctttgggtttaacattatcccaaacaccatcatcaactaatttagtaatgtagcaaacactaattcctttaggagaagcatttggaatgacagtatttaagcaattcatgatcataaaatcatttttatccatagttttacaattttcatattgttttctagtatcacctgttgaagcaatgaacacactatagtcatttattccaagttctcgacaggatttatttagcccaagatacaccaaaaaggcactggttcctaatttatgtgagtttgcatattttaaagcatactcaggaatacacttttgatccatcatgttgccataaactgcgtgaggagtaattccacaaataacttccttagcaaaaactttttcacctttaatttgcacaccaacagcttgaccattttcaactaagattttttctacagttgtactcagccaaacatcaccaccattatcataaattacttgtgccaatgctgttgacatatcatgacttcttctttgaggaatataggcatcgttttctacataagtagctaacatagtggcaaaatacggaaattcaaattcatcagtgggaatatcaatgtaacaccaatatgctccaagaatttgttgagcttttttaggaagttttaatttgttaagcacatcatcccaactcttagtagcatactcgataaaagctggatatttttttataacttcttttttatcctttccatctgctatttctgctaacgcattcatactttgctcacacagatcaaaaagcttttccatcttttctgaagtacctggtacatatttttccatcgcattaataaaattttctctaccagctggcatcttaacatcaaatccgtctttaccataaataatatagcgataagtatctggtaattcttgcatttttacgttggcacctaaccagtcatacatttttcgtactgcacgcggattatcagcatgaccatattcacataattcatgcaaggctacttcaaactcaaatctgccgcgaataaaactggttgctgctccaccagccagattatgtctttcaatcaatagagtttttttgcccattctagcagaacttgcggcggccattaagccgccattgccagccccaactacgataacatcatatttttcagccattttttaaccctttcgttttcaaatgattacgttttcattataattaatatgaattaaaaaaaggatcaaagtaaagaaaaacaaagttattttatataaactagccgttggcttctggtcctaccagtgcaaaggagaataatatgaaatttcacccaataaatgtacccactgcaacagatttattcttcgttaatcaattaaaaacagcaatcttaacaggaaagtttaacctcggcgataaattacccagtgaaagagttttacaagaacaacttcaagtaagtcgaactgtgatcaattccggattaaaaaaattagcggcattacattttatagaaattcgtcctagatatggggcttttgtagcagattatcgtgtcgatggcgatttgcaaacaatgaacgaaattattaatttctacgggggacattaccgaatttcacttttaaattcgatttttgaaatcaggaaactaattgaaaatgatgttgttcgcttagattgtatagaacaggatgaacaatgcctgcaatcagctatttcaaatatgcaaaatcttgccaaagccaccaattccaaggacgctgcacaagaaatatttgcttatgtacatagtttagccttggcctccaagaattatgtttatcctttgcttatcaataactttaaatcaatctatttaactttaggtgaatggatctgtaatgaagtcgatgttaattctatttctgaagagaatctaaaattaattaaattaatcaaatcaggagataaaaatatagcaattgcttataataacaaactgattaattggagttacgagattttaactaagcaataaaaaaacggtcgatttgcttttcgaccatttttacgcacgttttgcgcgcgattatttatttaaaacatattttgtagatctaccctcaccaattctctcaacataaccttgctttgttagttgtttaagtagatttaaaacttttgttttaccaaaattacttgctcgactaatttgtgtagaagtatttgcaccctcgcgaatggttctaaatactttcttttcatcatcgcttaaatcatcagtaataaattttagaattggtaaaattatttttattgaattttcaaagatctcgaactgtggttgaactaaacttccttgataggaatctttaattctctttattcctgtaccaaattgttcaattaaacccaatctaaaaaagacattagccacaataggatttcttaaaatagaaatttgacctgacagatactcatctttactcaagttatgaggtaatcctcctggagaaactacttctattcgattatcaaacatagaaactttaatttgagcattaatattccaagtcctatgaaccaaggcattagctattgcttcacgaaaagcttcttcaggaatttgacttataacgttacgagtaacaccatgtatttcctcacgctgataatactgccgatatttttgaatagtttggtcatactctttaagaattgattcattctcatagtttgccctatccagcataatattaatattttcaccaaagcgaacgacatcaatcccacgataatgatttttatctgctaataattcacccgcattagtatatccggcattcttctgttctagattaagagtaattagcacatcggatgtcaatttattaattcctagtttttcttttagtgccatttctaaaatattaaacgatagattttgatttgcagctgttaaactgtcataagtcttattttcgccaatcaaaattagttgtgataattctgttctatccacttcaattgaagcactatcatttcttttataagcttttgctttatataaatatggtggattatcgccctgttttaccgtcaacgtgactacattagttttatcatcaatctctaaattataatctggatgtggctggatggaatcatttattttattctctacatttaaacaaaaatcaattggattttttacaccaataattgttccatcatcctttataccaaatttaacttctcctgtaccataatttgcatacgcactaaccgtttttaaaaatgtgtttgtaagattctctttaaattctaaattctttgtttctctcacttaagtcaccttgccaatctattttatctacaattatactctttcgcacacaaaaaaacggtcgattttattttcgaccgtttttacgcacgctttgcgcgattatttatttttcgttcacgataatcaatgacttaattgcttcacgattgctcattgcttcgtatgcttcttggatatgatctaaatcaaaactcttagtaaatacttttcctgggttaatttttccatcaagaacagcttgtaaaagaacttctttatcaggcttagttactgaagcaataccaccgcgaagaccgacatttttccagaataattggtttgacttaggctctgcatgtggtacacctactctaccgattaccgcacctggacgagcaatttgaccagcttgttcaattgcactttcagcacctacacactctaagaatgcatcagcaccagcattttccttagttaaagccagtacatctttaactgcttgatcatcacgacttgaaacaatgtcagttgcaccaaattcttttcctaattgtgcacgatcatcgtggtgggataaaagaatgattttttcagcgcccaacaacttagcaccaataacaccggcaagaccaacggcaccatcaccgataactgcaacagtatcgcccttcttaacttcagcgtttaatgctgcgtggtaaccagttgccataacatctgacaatgtttgaagggatgccaattgatcatcagtataatctcctggcttaccgggaatcttaactaatccagagtttgctggttcatatttcataaattcggcttgatagccaccgttagtacccggcttcaaattcaagcaattgccttcaaaaccattaatacatgcaacacaatgaccatatccatgagtaaatggtacgagaacaaaatcatttggtttaatattagttacctcatcactaacttcttcaacgacaccaattgcctcatggccaattaaagacccactttcacgatcagcaattcctctaaaccaccataagtctgaaccacaaacacttgcacgtataacacgaataattgcttgattttcaccatcgatttttggctttggaacttctcttacttcaactttacctggttctacaaaaactgctgctttcatattatttctccttactatcgtttactttatatacatagtctaatcaaaacagactgtctataaaattactaatattaaatgctactattcaaaaaacgtatagtaatttcatttatgaaaaagaaccgcttgcttaaaacaaacggttctaactattagttacttattaatcttcatcagtattttggtgctcttgactgtcatttttttctttttcataatccttgtcatgatctttttcatcatcttcagtctcagtctttataatcttctgatttttagcatcaatttcaacttcggttttcttacctccatcttcaaattctactttccagattggctgatcatcatccatttctaatgaccattcaacaggttgacctgatacctgagtttgagccaattgagtagcttgctctcgagtcatcatattattaagatctaatgcttgcgcctcatcatctgaatctaatttttcagattcagcttttaaaatattgccattacttgcatcaatcttaactttgtattcattttgtgaatcaaaaccttcaatttcatacacatatgaattcttcttttgctctagttcaatctccttaattgattttgagccatacttttcataaaacttattaactgcatcttcttgagaaagattaatacttgcagtacctgtattactttgattttgttctgtgttattgctttgactctgttgcgtttgagtgccagtagaagcattagcctggttaatcgccaataaacttgcgccacccgctgctaagcctaatgcagctgctgccaatgatacttttttaatgttaaactttttcataattgaattcctcgcttttcgtattaattaactttgtacacttagtttacgaaaaaaggaacctttaaaaaccaagatttaatgtagatcaaatgaaattttcttcattttagagttttttctaattaaattgatttttcaataaatatcctatacgcgtggtgctagttaaatcgttctagacaatatgccatattataagctaaaatagctatttctagccgctgttgaaagcctactggacttcttgctcgattattctcagcgttgtaataactaagcaaagaaaagtcgctttcaatgcttcttctaattgccatcaattgatgatcattatgccttctagctccttgcatatttttacgatatggcgtccaaagcacatatcccatgtgctttagattagtagctagatttttgcttaaataaccttcatctcctaaaagataatggttggctggatgagcattgatcatcaattctactgtctctttggcatcatgtactgacgctttagtaactgcatagtcaagcagatagccatcatcgcttactattgcgtggaccttgaagccataataatagactttcttggttgctttataaccaatatcagctacgccccgaaagatcttgacacgataattgcgaacaggctggcaaactggcactgggaaactatcaataatcaaaaattctccagctgtctttacttcttgattccaagcctgacggatacaacgaattagaggcaagagcattcgagctcgacggttaaaacgagaatgagataagccaacgaagaatttacagaatcttcgttgagattcaattccaatttcagtttgccaaatgagcatcgctaagatagaactattaggaagcttggtctgatcaacatttttacgatgtttaagtccatcaggcgcataaagcttatacagcgagcgacaaatcacatttaaccgattaaaactaacttgtaaatggtgagaaaaacgcttaagcttgagatagttcaattagatcagactcttttctatttaaattacttacaacttgagtctagtctaattggacttttttattaactaaaacgatttaactagcaccacgcgtatcctataaatttgtctcttttttgacttgttctagagcctttacctgtgcttgatctaagggacgatactcattcatcttattaagtaattcagttaatttgttggtattcattttatcactctcgtgttcattagttgcttttgttaattcattttattatagaaccctcaataatcactaaaaggaatttcaaaaagatttagcgtattttatcacctttggaatttttctaattaaaaaagttattgacaaatttagaaagcggttttattctaagaatgaattaaataatgttcttcgaggcagggtgaaattcccgaccggcggtaaagtccgcaacccgcataagcggttgaatcctttaatggtaccgatagttacagtctagatggaagaagaataattttgctgtgctcttttctattttgatagtaggaactgtacttaaattattttttgaatgttagttagaacctcgaggtaattcttcgaggttctttttttgttctgttaggaagtgaaagaaatggaaaacagtgatgaagcatatatgcaattagctatccaagaagcgaaaaaaggactctatcaaacatggaagaaccccatggttggagctgtcatcgttaaagatggcaatatcttggctacaggtcatcatattcgttatggttattatcatgctgagcgtgatgctatttcaaaactaactccagaacaattatttaattcaaccctatacgttactctagaaccatgcagtcattatggtaagcagccaccctgctctgatttaattgtctctagcaaaattaaacgagtggtaattgcgcaagtagatccacatcaactagtaacgggtaaaggtattgccaagttaaggcaacacaatattcaagtaacggttggcgtattagaagatcaagcaaagaagctaaacaagttttatacttacttctaccaacataatcatccatggataacgttgaaacaggcggtcagcttagattatcgaattaatgaggctaaaaatattcgcactcaaataacaaatgaaactgtttatcagcgagtacatagagagcgcgcaaattatcaagccatcatgattggatcaaatactgccattatcgataatcctagtttactgactactgtcactacggattttccacccattcgaataatagtagatcgacgtggtagattactgaatcatttaaatattaagttattaacggataagttaagtccaacttggatttttactcaaaatacaagcttagctaagactccacataatgaaaatatctcaatttttttgatgaaaaacgcttcaatcaccgaagtcataaaaaaactgaccaatgaagagatccagtcggtttatgttgaaggtggtcctaccctagctaatgccttgctagccgaaggtcaagtaaacaatttaattacttacataagtccaattttacttggtcaaaaaggaaagctaggaatttcacccagctccaaaacaactttacataatttacgtgctgaaaagttggatgataattttagaattgaaggtgaaattaatgtttagtggtctagtacgcggcgacgcacgaattgctgctattgataaaaacgatgaaactattgttatgactgttgcttgccagcccgactttactaaaaacttgcaaattggcgattcaattgcagttaatggaacctgtttaactgttgagcaatacactgatacttcttttgtagtaacgatgatgccacaaacttatcagaaaactacttttaagaatttggatatcaatgcccaattaaatgttgaacgttcactacaggtcggacaaagattagaaggtcatctagttactggacatattgatgatattgccaaagttacggaaatcaggactaacgaaaatgctattgaagtttggtttgcctttcctactcgcttaaaaaatcagattgtagcacaaggtagtattgcaattaatggcgtatcgctaacagtaatggatacacatgataatgttttctcagttggattaattcctcatacacaagatgaaacaaatttaagtaagttaaatgtcggctcagaagtaaatattgagactgatatcttaagtaaatatgtcgctaaaaatttagaaaagagaatttaaaatggacgtaaaaaaaattcaaaatgcaattcaatggatgaaaaatggtggtttagtgattgttgctgatgatgaagatcgtgaatctgaaggtgatatgatcggcttagggtctaaagttactcctgaaaatgttaactttatgaccaaacatgctcgtggcttactttgcacccctgtaagcaaaacaattgcccaacgtttaaatttctaccaaatggaacaaaataatactgatccatatggtacagcttttacaatcagtgttgattacaaaaccaccactactggtatttctgcttatgatcgtgcggcaactatcaaggcaattgctgatcctacttccaagccagaagacttctttagaccaggtcactgttttccattagtcgctaaaggtgatcaaatcaagaatcgtaatggtcacacagaagcttctattgccttagctcatcttgctggcgaaccagaagttgcatatatttgtgaagttatgaaagctgatggccatatggctcgtcgtccccaactgaaagaaattgctaaagaatatcacttaccatttttaacaattgcagaactacaagaatatattaatagtcctttgagtaaacgctcagagtttgtaaattttcccactaaatatggcaatttcaaaattaaggctttcgccaatgaaaacttagctattattaaaggaaagattgatcctaaaaagccagttttagtacgtcttcattcagaatgccttactggtgatacgtttggctcaatgcgctgcgattgcggtgatcaattacatactgccatgaagcaaatgaataaaaatggtagtggcataattctttatttacgacaagaaggacgtggaattggattaattaacaaattaaaagcttatggtttacaggaccaaggttatgacacttatgaagcaaatgaaattttaggttttaagccagatgaacgaaattatattattgctgccaagattttaaaagatctaggtattagtcatatcaatttgcttactaataatcctgataaaattgatcaactagaaaataacggtattactattgaaaaaagaattcccttggaaattcctgctaataaggtaaatcatgactatttagaaactaaacgagataaattccatcatttattagaagcactatagtgaggaacacagaaatgaatatttatgaaggaaattttaaaaacaataattatcacgttgcaattgtagcatccaagtttaacgaaaccgttacccatcatttagttgacggtgctattgctactttaaagcaatttggagtacttgaagatcagatcgatatctattgggtcccaggtgcttttgaaattggttttactgctaataagcttctcaattcaaataactacgatggtattatgactttaggcgctgtcattaaaggtgagactgatcattacagcatgattattcagaatgttacaaacgcaattatgcagatgaatcttaaagcagaagtcccaataacttttggtattttaaccactgagaatattgatcaagccttgcaacgatccggcttaaaagctggcaatgaaggttcctctactgctcagagtctattagaaatgatttcgctaaataaacaaataaagtaatagagtagagggagattaattctcgcccctctcattgcaccggacgtacggttccgtatccggcgctacgtttgtaatcatctacgagataaatagtattctagcggatcgaccaagcctgggcgatccgctttgcttatgcccaatacttttgggctaagcaaaaagttaacaacatgtccggtactgcgtttataccaacctaatcgcgtattagctactttatgaatatcttcgtcgctaaaattgcactttaatgccttgttaatccgcattaaattagtgtatattcttcttggcagtttccattgtttaatgattactacccgtatcttatggcgcagccattgactgaatttaaatagaaagtatttcataccgccaattttaaagtagttaatccaacctctgaccacttgatttaccttagtaaagactaacgatagaggttgagcagctgctttcctgcgacaaagaagctctctaatcttgttataaagcttggacaggattggcgaaagcggtccgccttgaggcacgccaatcttattgggcttaaccaaaccatcttccatgataccggattttaagaatgaccgaatcaaatggagggtggttttgtcatttactcgttctctaattattgaaattaatttatcatgattgaccgtgtcaaaatatttctcaatatctaaatcaattacccattgatatccatcatcttcatgattgcgtatttaatttctgcttgatgctttctgaaatagctatcaagttcttcaaccattcttttatctactcccggagcacctttattaatcttgactctatgaatcgcttctttaagattgctctgacttagaatctgttcaattaatttcatctcgtaatatctccatttctacttgtaaatttattcagaatcatcccaattgctttcaccatcaaagagttacgttctctttgtgctaggctatcctcttattcggactatctgaacattgcttatagcgggatatgctcttacaaacattaggtccttcgctccagtctcattacaagactttcaacactactatgacctcagctgacttcttgcgactaacctttttcgaccaggcttacgatcgctgatgttaaagcttgctcagcttgcctgtccgcaagatctctcggggtaagacattcatctttgattttccactgcctcctggtttaccgtcttgactttacgtttgtcttttggacttcgacttgtatcgcagccttatccgccatttggcctaaccaggtttctgtacgtaggctcggaaaactcgctagccacttccttcacccatagcgtcaccgctatcggcttgtggttcactacacttggcgacaaatacccgtggtccaaactttcattggattagatgaaatgtcatgcccgacacacaagtaaaaagccaccgaagcactaatacgcttggtgactcaaaggtctaattataagtttcttctactagtagctcatatggctttagcaagtaggtagctcccgtttctttgataggataattttgcacaacaacttttttgcgggaaatatgataattaacttaaacttcccacacgcaaaattgcttgtttcattgtgattctgcgtgttttgacaaatataaaaggcacaagtccttttcattgctataattatattgaccaaaacataatttatttgcatgaaaggcttgtgccaatgtctattttaccatctcctgaccaacaaaatgaacaactattttcaaactcaatcatcagcttcatcaagaagtttcaggtgatcaagctgttgagaaaatgtggcttccgcaaggaaaaaggcattagcctgttcagcttgtttctttacgttttaagcaatgtctttcgtgaccgcagcttatatatgcagctgaaaatggatcattttcaagaaaatttttccaagaactcatattaccgttttatgcgcaacgttcacgtcaattggctccacttcaccacacttctgtctgcgcaaatcattaataaccacttgcgatctttgacttcagaaaaacgggctgattgctttgttgtcgatgattcctacttctctaggaccggcttcaagaaaacagaattagtcgccaaagtttttgaccatgtatcaatgacttacaagaaaggttttcgcatgatgaccctgggctggactgatggagcttctttcatgccaatcaattcagtgctgctgtcttctcagaagctacagaatatgattggcgaaaataaagtttttgatcagcgcaccattgctggccaaagacgtatgcttgcccggactaaaggcacagacgtgatggttaatttaatcgaccaagctatgaaagcaggtcatcaagccaagtacgtgctgtttgacagctggttctcaaatccacatcaaatcgtccagctcaagcaaaggaagctggatgtgattgccatggttaaggttagctccaaaatcaaatatgaatttgagggagaacgcaaaaacatcaaacagatttatcgcagctgtaaaaagcgatgcggccgttctcgctacctgctgtcaatcccagtcaaagtcggacgccaggacaaagacggtgctaaaatagatgcacggattgtctgcgttagaaaccgtgccaatcgcaaggattggctggcaatcatttgtaccgacatgtcgcttagcgaagatgaaattatccgcaactacggcaagcgttgggatattgaggtttttttcaaaacttgcaaaagttatctaaaactaagtacggaatatcatggcctgtcttacgatgctttgaccgctcatgttgccatagtttttactcgctacatgcttatgtcagttgccaagcgggacgatgaagatgaacgcacgctaggcgagctgttctattgcatgattgatgagctggcggacattacttttagccattccttgcaattgattactgatgcaatgctggccagcgtaaagcaagtctttcatgccagtgaagcacaaatagctgaattcacggctgactttatcaatcgtttacccaaatacatgcaaaaattgttaaagaaaactagcaaaaataatatagaagcctaaagccaagcaagatcaagagattactggcttatttagtgtgggaagtttaagtaattaattcttcctgaattgtcaaattaagtgcaacagttaggttatgaagagatatattgcttgaagagttcctctgctgtgtgatattggaggattcggcgatatttgtggttaatggcatcagttgcctgttgaacataagcttttgacttgtctttcatgctcttgcccttagggaagaattgacgcaaaagaccattgcagttctcattggtgcccctttcccatggagaatatgggtgagcaaagtaaatctggcagcccttgatcttggtcatatccgcaaactcagagccattgtcaaacgtgattgatttaaaccaggcaggatgtctgtcaatctccttttgaagcagcctttggcatgtgcttgcccgatagtcaggaatcttgataactacttcaaagcgtgtggttctttcagtcaaagtcattaaagcaggctgattcttgcgtctgacgcctttaaccagatctccttcccagtgcagcggagcttttctgtcttcaatctctttaggacgctgttcaatggaattgccaagatgcttcttgtgcaaagcgtgaccgccatggctgtgatgacgcttgttcctgcgtcttttgagcttcataggcagatcaatattgcttatgtccagcaagccctgatcaatatagcgatagacggttggtgtgctgggacaagggtagcctggcatagtccttttgaattcaccaacgaactcatcgatgctggtggcatcaaatttagctttaaagcgtctggagagcattctcaaaaagacagcataatgcttcaatggattgcgctgatagcagtttttgcgacgcttctcataataaatctgtgcagtatcagcgtaatagtgctcatacaataaatagctgctgtctctttgcaggacacttccgcgtttgatttcgcgactgattgtcgacttatggcagccgacttcttgagcgataacagtacgggaagttatgccggaatccagcattgcttgaatttgtccacgttgtacgctggttaattgatgatagtgcttagaaatgctagaatttgaattggtcataaagatcttcctttcttgatttttcgtcacttcaagtttaggtcttcatggcctttttgtttaacacttagtgttgcacttcaattttaaatccgggtttttaattatttatttaatcaaagtaggattctaaggtgtcctgaacctgaccaaagcctttatgaattcgattgaaataacggtcattgtagctcattgcctgaatgccaataaaagcatcaagcgactgttcagttggaaactctgccttaggcttagctttgcgcttgatcacattgttaaatgattcaatcatgttagtcgaataaattgaagctctgatctgcttgggatagttataaaagaccagcagatctggttctatgtctttcaagcttctgataacatggctgtaaaccttgccccatttggtatagaagtcatgcaggacagctgtggcttcttctttgtttgtctgttgatgcacctgtttgaattcgttcatgatcttttcacgatcgtcgacgcgtactttagcgcagatattgcgcatgacatgaaccaaacagcgttgaaaatgagctttaggataagtcctggccaaggctgttttcatgccaacaacaccatcagaaagaaaaagctcaacttgctttaagcctcgggatttcatgttttgaagcatatctgtccagacttcaatgttctcgctaggtgcaatgcagtagtcaatgacctccttgtgcccattaggcttgatgccaatggcaatatagactgcttcacgctcaaatgtttctcggcgcaaaggaaggtatgtcgcatccaaatagacgcagaaaaacttgtcgcttagcttgcgtttgtggtaagcctcaacctttggaatcatctgcttggaaatatttgatacctgagctggactgtaatggctgccatacatcttttcaattagatcggctatttccctggtggtcacgcccttggagtaaagcttgataatcatgctttccaagatatccgagtgctgcttgtagtcaggcagcgtgtgctgatgaaattgaccgttgcgatcccggggcacttgcacttcaattgggccaaattgcgtatcaactttgcggaaataagcaccatttctagagttgccagtatcccagccatttctggcatagggatcatagcccagaaaggcagtcaattcagcttctaacaagttattaacagcctgttgtagctctttgcgcaataaatcatttattttgtctggattgaatagagcttgagcaaaatctttggtaaaatcattcatgaaggagttcttctttctgtatgtgtttttttgttcaaaccaatcatacgagaaaggaactcctttttctaatgtttaaagaaataaatttaaggaatcattcatccttacacaaaatattttacagtctcatcttttagccaagagtattgtaatagacatataatacagtacaatgattattatcaattacataaaattgatgcaattaaaaattttaatcctgaaatttttccagtttatgacaaaaagcaaaaacaagtttattactttaataaagaagacttcaactatctggacgacacagatgccactttaaagaatctacccaattgggaaaaagactcgtacaagctgtattaagaatttcaaaatgattttgaaggcaagcgttttattgctcttccgtctaaagaagatttaaacgagaatagactaatctttgattactgctgccagcttgaaaataatcaactaggcaatctgttacttgatagttttaatggaagacatgcttttcgaaaattcaaaaatacactttatcaaaatcatcttctagaagactatgaaaaatataaatatcaagccgagaaaaaattagcaaccaactggtgcaaagaacataatttaatctaaaaaacactgacaggtcaatttgatctatcagtgttttttcatttatcgatcaatttttggtgcttcaccaatctgtgcttgcatcatccagattctcttttcaatatctgtatggcatgacgttaagatatcatttgagccatagtcgccttcctcgtcacttaccttaatcccttcttcataaaggtgctccaaataacgataaccagcaatgatagtcgcaaatctttctctagttgaaattccccattcgccaggatgagcttcgatcttagtatgatcaagcacttcctgtaagcttgaatatggtgaaccatcaatcgtgatcaatctttcggagatcagatcacgttgttcatccaactcgtccattaccttgtccaagtatgggtgcaatttcaaaaattcaggtccgcgcatataccagtgttgttggcgcacaaccatcattaattgagtggtgtcagccacagcttgatttaaaatttcttttgtttttggatacttcataaatttgcccctttcaccaaaaataacttactttataaaatatatcatagctgatgaaagtgattacagcaaattatttgattatcaaaaaagtgcctagaaaatcagcttcttttcctaaacacttaattatctatttctcttctttttccttgcagtggctcttgcacatacacttttgctcatcggccatcgggcaatgacaaatgccatctttaccagcgcaagggcaaccatcttggcatttcatcccattatgacaaaacttgttttccatttctgtcacctcgatgccatcattatactctaaattttttgttcaatatcactaattttcacaactaaaacagctctaatccactcgaattgcgccttcatttgatcaaaataagttccttcagtgatgaacttgccactaccgtgaatgtgatagccgcggcccataccagttgtgccaggataattgtaagaaccaaccgcgattgtcaaagcgtgctcaggatctgccttcaaatcattttgaattgagtgcatccccgcagccggaatcaaaatcgtgtcatcagccactacattaatatactgtgaccaagtattcaccacactagccggcttaccgttaatcgaaacgattgtagcgggtcccttatcacgtaaaacatctaagaattcttctgtcataattgccataatttttatctcctctcaaatttgtaaatataatataaaggctaatcccgacaaaccatgacattatttaatattttttcataatctgcttcaacttagtgagataattcttcttcaattcactcggctgcaatacctgcacgtcgctgcctagtgaaatcagataatcaaccaaatagtgtaattcttctctattatactttccttggagataaattttccctgcatcatgcacaatattcataatcgggtaagaattatacttcaccttttgctcgccattttcagttaataagcaagaatacggcacttgataataattttcttcatatttttgcaagttggcagttaatggttctttattcattattttagtttcagttggtaaaacacgaactgcctcgaatttatctaaacgcaaaacgtaccattttttcaggtctaaattataggcatgacagaaccaattgcccgcctgaaagaaaatatcgagcagctgcagtttttgttttccctgcacaaactgaaaattttccacttcaattaagctgttatcaatgcatgccttaagcaaagtcgcgaaaaactttacctcatttaaacttggctggctatagaaatgcactaattgtttctgcaacttaacctgctcttgtaaattctgcggtaggcttttaaccagtttcaattcaatttcatcatacgcattgctgtacggcgtctcactgatcccgcgaattgcttgcaatgcaaaaaagatggcgttaatttcttgcgtgttaaaccgaattggcagcagcaatttactattagtcaaatggtagccgccattgcgcccactttcagtataaaaagctagacctaattgctccaaatccgcaatatcgcgcaaggctgtccgctccgaaatagcaaaatgttcttctaattcttttagatgaaaaacttttttgtcactcaaataaattaattcttgattcaatcgttctgattttttcatggatttctgccatcctaaattagatcaatctgacgcaatttccttctcaatctgccttgttcttcgagtaaagcaaacttacgcgacaaagtttctggggtcgtaccaagatacaaagctagatctttcagttttaacggtaaaacaaaactattttgaccaatttcatttgcatacatttgcaaatatttgaataagcgctcttcaactttaggtaaagttaacaattgaatttgcttttgcatagcagaaatttttgtcatacttaactctaataatctaatgctcaattctggctgctgatggatcaacttcaaaaaatcttgtcgccttaataaacatatttcactattatcagttgcttcaacataactatgcgtattaacttgaccaaaaagccagtcttcaccaacataatcccctgtatgtaagacctgtaagacatcctcatgtccagtttcatctaatgtatatagcttggtactgccatgggccacaattactaaattagcacttacagttggatcaataactatctcacccttttgataattttgatgttgcaccaatctttctagttttattttttcatcttgtggcaaagccgtaaataatggtaccagatcaacgcataaatcagccattaaactcattcctttaactaaaagtcatcatcgtcttcttcagtatacaatccttctttgagatcatggcctaaaaaactttgacttactctaatctgttccttaatccaagcaagcaaatcaatcaaattagcagctaactctggccaattttcatcattagctaaggtaatagccttagtaataaacaaaatctgcgtatcaaaatccttcaccaagttgaataattgttgttcacctgcaagatatttgctactgccatcttcttccaacatggtatattcctgaaattgcttgctagtagtcggaatactttccccgttattaactaataaatggtttaaacgcttgaattcttcatgctcatagttcagccactctgttgccttatctgctaagaataggcttgcactgccttgagcaaacaagcttgcttgactgattttcaaagaatgaactaacaaattagaaataatatgaccagtcattgccgctgcagttggctgatgatgatcaagatcactttgttttaattctgcttgatacttttcttgtgcattcatcaattaagctccttttccttgattccttgtacttcataacccatcttttcaattgcagctttaacatctactgctttaactttgtctggatccatcgtaaacttgagcttccccgcattgaacattaccttaatttgatcagttccatccaaattatcaactgctttttcaatcttagtcaaacatgaaggacaagtcatacctgccaatttcatcattactttttccatttatctaaatttccttcccattagtttacatgtttaatgctacatcgatttgttttttagaaacttgatgatgatcaagtttttgcttaaacctaattaatcgcatcccatttaagataacaactaaaatactaaattcatgaataaacatcccactagccatttctacataaccagcaaatagaccaataaatagcagtaatactgttaataaagcaatagcaatattttcgttcatattaagaactgtcttttttgctaaatctattgcataactaactttacgtaaatcatttttgactaaaacaatatctgaaacatcaattgcgacgtctgtcccacttccaatcgcaatagcaacatctgcgttagccaaggcaggactatcattaatcccatcaccaatgaaagcaacgtgataacccttttcctgctcctttttaacaaaagcagccttatctgctggcaacatttcgccataaacttcatcaattggtaattctgcagcaacttgcttagctgttttaaaattatcacctgaaagcataactaattttttaacgcctaatttcttcaagcgagttaaagctattttagcctccgggcgcaactggtctttaataccgaataccgctaattgactttggtctgcattagcaaaaacaacaattgaatttcctaaattgcttaaatgatttatggtatgtaataattcctgattaagatgagtattttcagtaattaaattttgattaccgagataatatttttcaccagaaatagtagcaattaggccctttcctttaacggtttctactttaatcacatctgatgcttgattatctaacttggcaatcgcctgagctaaaggatgattactttgttgttcaatttgagcagcaagcctaattatttcattccgttgcccctttagtattttgatcgcactaacttccggatgacctacagttaaagtacctgttttatcaaaagcaatttcgtcaatcttacgagtttgatccattacttgagatcctttaaaaataatgccattctttgctccattaccaatacctgccactgtcgacaccggcacaccaataatcaaagcaccgggacatcctaataccattactgtgattgctagtttaagatctctagtaattaggccaactataattgcgatcaccaaaacggcaggggtgtaatatttagaaaagcggttaatcaatttttctgcatgagatttggtatcttgagcttcttctaccatttcaatgatcttgccaaaagttgtatcctctccagctgcaatagtctcaatcgtcaatgttccatcttcaagaattgtccctgcataaacctgattgccaatttttttattagccaagctagattcaccattgatactagcctcattcagatagccagatcctgaaacaatttttccatcaactggaatttgatcacctgttttaactaaaatccttgtacccggatcaataaaatcgacgtcttcttccttagtggagccatcatcttgcattaccaaggctgttgttggagccattttggttaaatctgagatagctgagcgtgttttcttcaaggtgacttcctccaaaaaatcgcccagcataaacaaccaagttacaatagctgcctcattaaattcaccaataataaacgcaccaagtactgctaatgaaactaaaacatcaattgagattaatttaaccttgatagatgaaattgccgttaaaacaatcggaattactccaataatccccacaaccagcattaacaactggtatggcagatttaaatgtaacaaccattttgatccctctgccaacaataacaaaattgtatttaaaagcaggatttgctttttatactttatgaaaaagcgttgtactttaatcattttttcccctttcctttacctgacgattattatcataaaagcaaaagaactctaaaaacttgatgatgatcaagaaaatcaaagatttataatttaatttctgtcaatatttgtcagtatttgcgactataataatcttcagagaaataatgagcaagaaaggtgacaatcatggttgatattttaactaagcaaactactaatcaagaattcttagactttgcggtcgagcaagttcacaacgccgatatcgttactactcacgcaggcgagcctagcgcccaagtttgcgacttattattgaacaaaaacggtaaattatatatcgcaacttcaagtcaaaatccattttttaaggatttgattgctcagccaaaagttatcgtggacggttacaaggggggacggaacgatggactattgcggtttttcaattcgtggtacaatcaaaaatgttgatcacttatatcttgatgaaattttcgccaagaatccttatctcaatgaaatttatgccgatgacctagaaggtgctaaaaaagatttacgtgtccttgaaatcacgccaattaccgcgggctacttggattaccgtactaagccagtcttcatgcgcaacttcaaattctaaacaaaaaaatcagagctatcatttcgacggctctgattttttgttttttcaattaaaagaagattttactcatgatgatcataaagaccaacaaacaagttgagctgattgcggcagcaccgaacacggcaccaccgcgcttgaagatcaccttgaagttaactgagattcccaaggcagccattgccatccctaaaaagacatatgcggcttgcactaagagatccagtgtttgagcagataatggcaaaaatgtcccgataatactcgttaagataaagccacccaagaaccaaggaattggcaatttctttggcgccttggtatgttctgcctcactttcagtcaccaaacgcttttggtaccagtaacccacgattaaagcaaccggtgctaataacaacacacgtgacaacttcataattaaggagctatccaagctgatctcaccaaacgcactaccagcggcaaccgcgtgagcaatttcatgtaaagaaccacctgcgactacaccatattgtgtgtcggttaagccaagcagcggcttaagcatgatctcaagtaatgtgaacatcgtccccatcacacagacaacggccactgccaaaacttcattttctctttttctttcttcatcagtggtctcaatctgtggtgacacacccatgacggcggccgcaccgcagacaccacaaccacatgctgaaagaatagcaagctcatcttcggcgccaaatttgcgactcagccaataagtaagcacgatcgtcccactaactgcaaacgctgcaactaagattgtcttcacaccagcatcagccaacttggtcaaattaagccgaaagcccaacaaaataatccctaatctcaaaaacttgttggagataaaacccataccacttttagcttcagtctgaacgctctgcggcgtcacttgcaatgcaatccctaacagcaatgcaattaccaaagctccaattaagtttacatatggcaacttagccaagaaaattcctgctacagaacaaaataaagtcattcctgcagctaaccaaaatgatttagttttaattatgtttgtcaacaaaaatccctccgtatgtgatcaatttaatttgacaaacacaactcccttaatgatgatgtctataagtttactcttgttttctatctttgacaaggtatattgttaattatttcacatttattcaaaaataaaaaaagaccaagtatctgcttgatcttccacatattgacaaaaaggagtgtacaggatttgaacctgcgcgccaaggaaaacttggttcgccggatttcgagtccggtgcattaccactctgccaacactccgtaacaaaaatattataacctattatttgaataatgccaaaatatctttattattttgactgtctttttgtctccgtaactgctacactttgcagtagtacatcgtactagtaaaagatatagaaaagagaataaattatgtgtacttacgcgtggtgctagttaaatcgttctagacaataagccaaattataagctaaaattgcaatttccaaccggctttgaaagcctatcagactacgtgctcgattgttctcggcattgtaataggtcagaagcgaaaagtcgctttcaattgttctgcgaatagccatcaattgatgatcattgtgctttttagctcctgtcatatttttacgatatggtgtccaaagttcgtaacccatttgttttagctgttgatgcagttctttgcctaaatagccttcgtcgccaagaagatagtaattagatggatgggtattttctatcagttcaactgtctccctggcatcatgaactgatgcctttgttacgacataatcaagaatgtaaccgtcatcgctaacaatggcatgaactttgaaaccatagaagtaaattttcttggtggccttataaccaatgttggcataaccgcgaaaaattttagcacgatagtttcgaattggttggcaaacaggtaccggaaagctgtcaatgatcaagaactgtccattcaggtcaacctttttattcatttcttgccgtatctgataaatcaattgcaatagctgacgtgaacgccgattaaaacgtgagtgtgataaacaattgaaacattcacagaatcttctttgtgattcaattcctgtcttagcttgccagataagtaaagccaaaatcagactgtccgtagttttaatttgatcaatatttcgccgatgagtaaactcagccggtgcatacaaacgataccagtgccgacaaattatcactaaatctttaaaactaacttgtaaatggtggctaaaacgcttaagcttaaggcagttcaatcagatcagactcttttctattattactatttacaagtcgagtctaacaagattggacttttttattaactaaaacgatttaactagcaccacgcgtgtgtacttctattatttttagtccacaagatcactatttcggccgtaacctcgaccttgaagttacctttggccaacaagtagttgttactccacgcaattacgtcttcaacttccgcaagatgccagagatgaagcaacactacgctatggtcggaattgcgcttgacgctggcgattacccactttactttgacgcagctaatgaaaaaggtttaggcatggccgggcttaactaccctgacaatgctacttactacgatgtagttgacggtaaggacaacattgcttcatttgaattcatcccttggattttggggcaatgtgaaactgttgctgatgctaaaaagttgcttgaaaagatcaacatcgttgacatcaacttctccgacaagatgcaagcatccccacttcactggttaatcgctgataagaccggtgtttcaatcgtggttgaaactgacaaagacgggatgcatgtttacgacaacccagtcggctgtttgactaacaacccacaattctcaagtcaattattcaacttaaacaactacgccgacgtttcaccagcaatgcctaagaacaacttctcttctaaggtagcaatgaacggctacagccgcggccttggttcacgcaacttgccagggggtatggactcagaatcacgctttgttcgtgtagccttcaacaagttcaacgctcctgttggcaagactgaagaagaaaacgttgataattacttccacattttgcattcagttgaacaacaaaaaggccttgaccaagttggtcctgacgcattcgaatacaccatctattctgatggtaccaacctcgacaagggtatcttctactacaccacttacaccaacaagcaaattaacgttgtcgacatgaacaaggaagacttagattctgctaagttaatcacctacgacatgttgactaagccaacttttaaccaccaaaactaaataattaagaaataatgttaattttgtctaaagattagcattatttttatttttacggttaaaatagatgtacttattaaagtaattggggattttcttattaatgaataattattttgtgttgctgctttcggcggtaattttactctggcttatttttaacatcaaaaattcacgtcgttttaacctttttgaccattggttacaccaccagttggtgaaacgtcacgacggttatagttggcaagtcatcgccttcatcaatgatcctaagttaatggtagtttgggatgtgctattagcaggattattactaaatgaagagcgtaatttgactgccctttgggtgttagggaccttgggctttgcggatatttctggtattattttgaagaaattaatccgtcgccagcggccactaatgcattccgacaaggaagatggctacagctttcctagcggccacgtacttggggcgacaaccatggggttaattgttttgcaactatttgccaaggatttaggtaccggcttcttcattgtggtcgttgcactatgggccatggtgatcttctctcgtttgagtttgaaggcacactacccctctgatgtattaggagcaaccagtttagccatcgtttgcttcagcatttcacaacagctatttttagccatttaaaaagatcacgtttatcgcgtgatctttatttttttattcgtgaaaaccaaccataatgccgccttcttcggcgtagaaactacacaggccatgcatcggtcgaatcgttatttgcgcatcaggatattcggctaaaatcttttccttaattgtggcagcgtctttttcattttcgcagtgatcaataattacttcgccgccgtgataattatcttccttcatgtacttgataatttcacggattgcctttttcattccgcgcgccttagtcagcggttcaagtttaccttctttgctagctgtcccaatcaaattgatcttgagcaaacctgcgattttggctacagctagtgaaacacgaccgtttaaagataaattatgtagtgattgcaaaacaaaaagcaaatgagtctgcattctaaacttagcaattgcttcttctagatctacaaagcgcatttcaccttgcagcattttctcaataccatggactatgattgctagctcaggtcccgcacttcttgaatcaactactataattttactcaagggatgtttttcctcatacattgcttttgcctgaagggctgaagaaaaagtgccactcatcccgctggtcattgtgacgataatcgctttttctgttccttcaagtgcgtcaagccatgcttgaatacttggacaagttgttttgcctgccacattattttggttcatattggacaaaaattccttcatattcaaatcttgattatcaaggtaatccttaccaccaaaagaaattgtcagaggcactacttccaaattacgcgccggatcattattcatattggcacttgagtcaacaattaatttaatattttccattttagattccttattttttgtatttattttaatacatatattatagtcctttgatatagagttttttaggctgctttactaatttttaaaatgtaaaccgctttcatatgtttacaccgtcacaaagttaggctaaaatttgagatgtaaagcggagcaaaaattgttccgtatggtatgaaaaacataccataatttttgaggaggtttattaatgctcaaatcagttattgaaaatgtacacgcacttgaaattttcgactcacgtggtaacccaactgttgaagttcacgttactctttcaaacggtgtcgtaggtaaggctgaagttccatcaggtgcttcaactggtgaaaacgaagctgttgaattacgtgacggtggttcacgtcttggtggtaagggtgtttcaaaggctgttaacaacgttaacactgaaattaacgatgctcttaagggtatggacccatacaaccaaccaaagattgacaagaccatgattgacttagacggtactccaaacaagggtcgtcttggtgccaacgctatcttaggtgtatctatggctgttgcagttgcagctgctaacgatgctcaccttccattgtacagataccttggcggtactgatcttgaaatgccacaaactttccacaacgttatcaacggtggtgaacacgctgacaacggtatcgacattcaagaattcatgatcactccagttgctaagacttcattccgtgacggtttcgaaaagatcgttaacgtataccacaccttgaagaaggttcttgaagacatgggttacgaaactggtttaggtgacgaaggtggtttcgctcctaacatgaagaactcagaagaagctttgaaggctcttcacgaatcaatcatcaaggctggttacaagccaggtgaagatatcgctattgcatgtgactgtgctgcttcatacttctacaacaaggatgatcacaagtaccaccttgaaggtaaggttcttactgatgaagaattagcagattactacgacaagcttttggacgaattcccagaattaatttctatggaagacccatacgacgaaaacgatgttgaaggtatggttaagttcactaagagccacaaggaccgtatccaaatcgttcttgacgacttcatttgtactaaccctgcacttttgactaaggctatcaaggaaggtgctggtaacgcttcacttatcaagttgaaccaaatcggtactgttactgaaacccttgaaactatccgtctttcacgtaagaacggctacaacactatgatttctcaccgttcaggtgaaactggtgataccttcatcgctgacttagctgttgctgttaacggtggtcaacttaagaccggtgctccagctcgttcagaacgtgttgaaaagtacaaccgcttacttgaaatcgaagaagaacttggcgatggtgaacgtcttgccttcttcccagacgatgttgatcacgattaatttcgagttaaccgagtacaatttcaaaaaaagcatgagaattaattttctcatgcttttttgcttactcatttaatctttattttactaattgactaaagattttattcagagatgtatctttaactactttaactacaattgggttgccattcctagactgatcaagcaagataaccggcttatcagatttaaggcagaataagtaagtattgtgccaagatttaaagtcatcattagcaattgccagcacattataatcatattttgccttgcccgttggactgtagcctatcttaattgactttttattcaaaacaaaccgattagttgctagcactccaggataagttgcaccctttttggtctttaaattctttttcccatcataaaactgataggtctgaccggactttttaccccagttattgactgcagtctttaacttggctgtcttagctgtattccaaattacaacagccgactttttagtcctatttttccaatgtcattaagttaagacattgacaaattgaatctaatctctgtagaaccgaatcattatgatttggttctttttttgcataaaataaaggcgaaaagaacctaccttttcgccctctgattaaattattaaaccttcaaaattattgccagaaagctggtgttaattatgaaagcccttcacagaaatattttagatcgtcttgatcaaattatcaatgatactggaaagcatattcatgattttatcgatgatcctcatgccttcactaggaagcggtttttagatgcagctacagtcattaaaactactattaatatgcaaggaaaagatttgaccagtgagttgtttagagcttttggccaaaaagctattaaaaataacgataaagtagtcagtacttccgcttatgtccaacgcaaaggtcagctttcacccgcatgttttaagcatattctaactgtatttaatcagaatttatttaatatccagttatttgatcataaatatcgtatatttgccattgatgggtctgattttaatcaaatctggaatcctaaatcagagaatatcgttggaaatctcaatcataaaggaaagccatattgccaaattcatgttaatgcactctatgacctgttaaataatacttatcaagactgcatctttcagcctaagtcaaagatggatgaacgtaaagccgccattcaaatgcttaaaaagctaaattgcggaccatatatagttactatggatcgaggttataccggctttaacatgattgaaaattgtaatcgcctgcctaactgttattatgtcatacgtactaaaacgggatatggcgcatttaaggaagtagctgagttgcctaatcaagagtgtgataaggatatagcttgctgggtgactacctctaattattattatgaaacccataaggctacagaaaacgttcatttggttaaccatcattaccgtcaatatataaaatatcggtctaaaaataccaaagatggcagctgggactttggagagttatgtacaataaaatttcgtgcctgtaaatttagaattaatgatcctaaatcaggcaaagaagaatgggaagttgttctaactaatctaaatagagccgattatcccttaaaaaggatcaaagaaatctaccatttgcgctggggcattgaaacttcattcaaaaagttgaaatatgctttaggtagcgtacagtttcattccaagcaggatagatttattgaaatggagatctatgcccacatgattatgtttaacgcagtcagtcaaattgatgctcaagcatatgtaccacaaaaaaactgcaagtatcaatatgcgatcaatttcaaacagtcatgttttgtcatccaggctatgtatataatttcttcttcaactgaaatctttaaaaagattcttattcaaattagtcattacacaattccgatcagaccaggacgaaaagacaaaagaaatctcaaacccaaatcagctgtatattatttatatcgtgtagcctaatttctaaacaaaatttgggtttatttggcatgaaaaaagatcattcaaatgcgataaatcgcaaatgaatgatcttaaaagtccaagtcgataatttgtcaatgtcttaacttaatgacattgatatgaaaattagctctttttttatttaaacagcggttaaagagggaggttttgtgtgataatagacataagaaataacaaatggagctatttatgaatagaaaaatttttgtaggtattgctgcagtcactttagctgtgactttgacgggttgtagtcaagtacattttggtaaagatgcagtgacgattggtgaagtaaaacaaaataagaaaacagtaaacgtaaaaaaggctaaatctgccaaggtacaatcttcaagttccaagaagattaagcctaaaaaagactcgaaaaagaaaatcaaagagaataagaaaaataggcaatgtcattaagttaagacattgacaaattatcgacttggacttttaagatcattcatttgtgatttatcgcatttgaatgatcttttttcatgccaaataaacccaaattttgtttagaaattaggctacacgatataaataatatacagctgatttgggtttgagatttcttttgtcttttcgtcctggtctgatcggaattgtgtaatgactaatttgaataagaatctttttaaagatttcagttgaagaagaaattatatacatagcctggatgacaaaacatgactgtttgaaattgatcgcatattgatacttgcagtttttttgtggtacatatgcttgagcatcaatttgactgactgcgttaaacataatcatgtgggcatagatctccatttcaataaatctatcctgcttggaatgaaactgtacgctacctaaagcatatttcaactttttgaatgaagtttcaatgccccagcgcaaatggtagatctctttgatcctttttaagggataatcggctctatttagattagttagaacaacttcccattcttctttgcctgatttaggatcattaattctaaatttacaggcacgaaattttattgtacataactctccaaagtcccagctgccatctttggtatttttagaccgatattttatatattgacggtaatgatggttaaccaaatgaacgttttctgtagccttatgggtttcataataataattagaggtagtcacccagcaagctatatccttatcacactcttgattaggcaactcagctacttccttaaatgcgccatatcccgttttagtacgtatgacataataacagttaggcaggcgattacaattttcaatcatgttaaagccggtataacctcgatccatagtaactatatatggtccgcaatttagctttttaagcatttgaacggcggctttacgttcatccatctttgacttaggctgaaagatgcagtcttgataagtattatttaacaggtcatagagtgcattaacatgaatttggcaatatggctttcctttatgattgagatttccaacgatattctctgatttaggattccagatttgattaaaatcagacccatcaatggcaaatatacgatatttatgatcaaataactggatattaaataaattctgattaaatacagttagaatatgcttaaaacatgcgggtgaaagctgacctttgcgttggacataagcggaagtactgactactttatcgttatttttaatagctttttggccaaaagctctaaacaactcactggtcaaatcttttccttgcatattaatagtagttttaatgactgtagctgcatctaaaaaccgcttcctagtgaaggcatgaggatcatcgataaaatcatgaatatgctttccagtatcattgataatttgatcaagacgatctaaaatatttctgtgaagggctttcataattaacaccagctttctggcaataattttgaaggtttaataatttaatcagagggcgaaaaggtaggttcttttcgcctttattttatgcaaaaaaagaaccaaatcataatgattcggttctacagagattagattcaatttgtcaatgtcttaacttaatgacattgaaaaagaggctcacgcctcttttttatattgccttaattgactttttgtaaagaattaccgcaatccaaactgaaatgaatgatggcagtatcgcaactacaaacaaatttggatctaaaaaattacctactctgatgaagtttgtaattgaagtaatatgttttatgttactaaatatcgcttgataaactgtaacatatattaacgaccactgaatataatattctaccaaagtgagtgtagttgtcgaaaacttaaaaattttgctagccagtcgcatcccccaataaacaaaaacacctgaaagtacaacaaatgctgctaacagcaaaaacaagtttcccaaattaacatggtcccattgactcatgatcaaatacgcaattaccatgaaaattaagaaattaattgttgaacaacacagctgaatgacaaataaaattgcagcctttaagaattcaaacttgtgctctgatctgaataacaaaaatactactagaataattacagcaatgatgaaatatgtagtaacgtgcacagttatctcctactttgcctgttttaaggcttcgcttgtagcctctttaaccccattggaagtaaatgttgcaccagtaacagcatcgatatgagcagattgtttatccaaaatttcctgctttaatgttttttctgctttttgaccatactgcggcgtttccgtagataaatctaaatctacagttgaaattttattatcagctacagttaatgtcacacctacaaagcctgccatgccgcgtgcacgggcactatatgttccttcttttaacatcctttttcctcttttttataaaacaaaaatactgctatataataaatataacagtattcctaaaaaaagccacaaagatattgtgtttagtatatccccggatttaaaattgaagtgcaacactaagtgttaaacaaaaaggccatgaagacctaaacttgaagtgacgaaaaatcaagaaaggaagatcttcatgaccaattcaaattctagcatttctaagcactatcatcaattaaccagcgtacaacgtggacaaattcaagcaatgctggattccggcataacttcccgtactgttatcgctcaagaagttggctgccataagtcgacaatcagtcgcgaaatcaaacgcggaagcgtcctgcaaagagacagcagctatttattgtatgagcactattacgctgatactgcacagatttattatgagaagcgtcgcaaaaactgctatcagcgcaatccattgaagcattatgctgtctttttgagaatgctctccagacgctttaaagctaaatttgatgccaccagcatcgatgagttcgttggtgaattccaaaggactatgccaggctacccttgtcccagcacaccaaccgtctatcgctatattgatcagggcttgctggacataagcaatattgatctgcctatgaagctcaaaagacgcaggaacaagcgtcatcacagccatggcggtcacgctttgcacaagaagcatcttggcaattccattgaacagcgtcctaaggaggttgaagacagaaaagctccgctgcactgggaaggagatctggttaaaggcgtcagacgcaagaatcagcctgctttaatgactttgactgaaagaaccacacgctttgaagtagttatcaagattcctgactatcgggcaagcacatgccaaaggctgcttcaaaaggagattgacagacatcctgcctggtttaaatcaatcacgtttgacaatggctctgagtttgcggatatgaccaagatcaagggctgccagatttactttgctcacccatattctccatgggaaaggggcaccaatgagaactgcaatggtcttttgcgtcaattcttccctaagggcaagagcatgaaagacaagtcaaaagcttatgttcaacaggcaactgatgccattaaccacaaatatcgccgaatcctccaatatcacacagcagaggaactcttcaagcaatatatctcttcataacctaactgttgcacttaatttgacaattcaggtgtttagtatatcatattgatatactatttcttgggtcttgattgtttttataagtccttattatgacccatgtgcaggtagtagaatccccttctacctgttttattataccacaataaataactgatgttatatcaaatcctaagttcttttgaaaattttctcaaaagggcttttcttgcactatcctttataagttacgttaaaattgaaatggaattataaagttatatttaaagaaggtaaagcatgtatccagataataatattcttacatatttaaaatggcgtggtgacgttgacttctcaacatcgccttttaatgatattgatgcacttgttttatctattttttcttatcttgaattaccaggtattgttaaaagtaacggaacgacaattagtttagaaaaggctgccaagctctattttgcagatgatcatcctcgttatgataatttgcaataccaagaactatttaaattaatggctcatgcagaccgctttaaaaatgcaaaactgtcgtattttattagtacgttaactgaacatactcaatttagtgcaatcaaaattgaactaactgatgggaccaactttattgcttttcgtgggactgacgattcactaattggctggaaagaagattttgaaattagttttaaaatcactgtagcccaacaacaagcagtaaaattgctcgaaactattctcaaagctgatgatcaagattattacttaggcggtcactcaaaaggtggcaatttagctgaatatgctgccattaatattgagcccaaattaagaaaaagaatcaaacgtatttatacctttgattcacctggaattgcagaagaaattggtgctcagctccctaataagtatttgcaaaatactctacgccgctttgtgccagactttagcgtcatcggtcgcttatttgagtcgaaaaatattccagccactattgttgatagtactcgcaagggactaagccaacacgatgctttttcctggcaaataatcggttctaacttcgacaccagacgccaccgcaatgctcaatctcaagtatataatcaactaatcaatcaatggattggtaacgccaccctagaagaacgtgagtctttaactaatgacctcttctctgctttaagctctagcggcgcaactaagatcaacgaacttgataaaaatggttttggcggttttggtgcaattttgttttcactggctgattcatctcggcgaacccgtttcgtctttggttcattattttccagcatttggcagacgatcaagagccagcaactgaccaaagcgcttttctcaacagacacaattgttggttgggtgctggtagtattaggaatcattagtctaactctaccccaatatgcagtgcgcgcttttggcgccctagttgccttcacggggattggtttcagtgttcaccaaattttaacaacggcaaaatctagtctaaaagaccgacaaaaaaacttctttattatttcgtatttagtagtttttgctttatcaaccgcgttaatttctaataaccgtctactaattttcttagctcactacttcttaggactattcttaattatctattcctacattcgaattaggcaactagtctttcgtaaattacccggaatttttcagattactattgtagcgatcgaggcattaattgcttttgctttaggaattatcgtagtggttaaccctagtgcctttaatcggagagcaattattattatcggtattttgctaattgcttacggcttcttcaagttagttggcgaattatttggccagcgcagcaaaatgcccaaaaatcatcgttaaaaaaagcttgttaacttcaatatcagttaacaagcttttttcttagcccttaataaaggtattagcctttatatgctttaaaatgttatacccgattgcacgaatatgatttttactaccataagtttgattcaaaaacattacaattccattctgattatcagtagtcagttgcatccagttaacaaagtgggtatcaccaaaattgccataagcgacttttaaagtttgattctttttcagataaaaaccacctgagtaagtattaaccttagaacttaaatgaccaagataatggaactgttttttagtcagaatcttgccattttgcataccagattggattttataataatcattagccgttgaaaatagattcccagcaccaggcaattgagaaacaacattacgattagcataggcactagcactgtaatttttaccaccagaataaagatatgaaatcgcatcagtctttgaccgcggaatttgttgataaatatcggtttgcttcaacttcaatgatcgaataacccgctgtttcacattagcagcataagactttcccgttactttactgataatgcctgccagcaaaacatagttagcattattgtaattaaatttactgcgtcccgtattttctcgtgcattggcttgggcaattgtccaattgatcgcgccattttcagaaaaattaactccatgattagattctgttccaattacgttaattcctgaggtatgtgtcattaactgccccaccgtaatttggtttgcatgcttcaaatttggataccagcgtgaaatcttagtattctgattgaatttcttctggtagattaactgtgtaattattgcagcagtaaccatcttttgcaaagaaccaactggataaagcaattttgtattgccatttttcagtcgtttgctgtaataaccgtagcctaagctaacacgttgagcatgcccattttttacaatttcaatgcttcctcgtaaatgatgctttttcatcatcttaagcgtatattgccgtagttgcttatttgaataactcttcgcctgcacagcatgatttgacattatcaaacacgatgaacaaaataaaatgaaagctatcccgaacttttttagtgtcttcaaaatttcaatctccttttaatcctgaactattctaccacaatcaaaaagcgcaaaatcacttttaatcatggtttgcgctttcatttttattttttaaaatttttatagtaagttcatcttaactaggtattccgcattttcaaccgtattccatgcagcacccttaagcaaattatcggctacaatccacatgttgaaggcacccttattttcataatcagggcgaatgcggccaacaaaagtttctcgcttacctgttgcattaattggttgcggataaatttgatgtttaatatcatcttccaaaacattacctggaaaggcagcaactgcatctttaatatcttgtgccgttgcagtctcatcttcaagagtaaagtagacactttccccatgagaaattggcacaggaaccctaacacaagttgcagttaccttgatatctttggcattcatgtcatttagcatgatcttctttgtttcatgaatcatcttccattcttcatgagaatagccactatcttctaaaacatcaatttgaggtaacaaattaaaggctaatgggtaatgctttttgtctcctttagtaggtaaaatatgagcgtctgcttgcatgtctttaccatcaaggtagtcttgactttccttttttaattcatcaattgctgcttgtcctgctcctgaagcagcttgataagtggaaacgataatttgtttcaaaccaaattttcttcgaactggttccaaagccattaccatttgaattgttgaacaatttggattggcaatgatgccgtgatgctttttcaatgcttctggattaacttcaggtacaaccagtggtacatctggttccattctaaatgctgatgtattatcaacacagacagcaccacgcttaacggcttccggcagaaacttctttgacactgcaccaccagctgaggaaagtactaaatctacaccatcaaatgattctggtgtagtttcttcaactttcaaatcttgatccttaaattttaaaactgtacctgctgaacgtgaggatgcgagtagctttaagcttttaactggaatcgttgattgttccaattgttcgatcattcttcttcccacggcaccagtagcacctagaattgcaacattatattctttcaccattatttttctcctcgcaaaaaattcttcattctttccatcgcttcatgtagattttcatcactggaagcatatgacattctaacgtacccttctccaccaggaccaaaagcactacctggagtaataccgacttttgcttcaaatgctaaatccagtgcaaattgcatatcatttttaccatatttagctggaatcttagcgaaaatataaaatgctccctgtggtctaactgcttgcatccccatcttagctaattcatccaacacaaaatcgcgccttctttgatatattttgcggtatttttctggatcatccaatccatgctccaaagcttcagtcgctgcagcttgagaagagtcagttgtagtcgtaaccattaaaccatggactttaccaatttgttccataatttttgccggaccagctacataacccagtcggtatcctgtcattgcatgtgacttagataatccagaaatataaattgcccgttcaggaatcacacttgcaattgaaaaatgcttaacgccataagttaaagtactgtaaatttcatcagtaattacgtacagattgtgtgcttttatcacttcagctaatgccctaatttcgctttcggtggattcaactcctgtcggattaactgggtagtttaagataaccgccttgatattagattcttccttaagtgtactttctaatctttctggcgttaatttaaagttatcttctgacgtgttcattaatacataatctgcatctgctaaagttgcaactggccaatatagtgaaaataccggtgtaggaatagcaaccttatcaccccgattggtaattgaaaatagtgtcgcattaattgcttcagttgcgccaactgtaaccacaatttcagtttctggatcgtaaactactccacttgcttttttcaaataattgctaattgcttgcctaagttccaattttcccttttgtggcgcatagtgtgaatcattatttcgaatactttcaattgcagctgttttaacatgctcaggtgtattcatatcaggctcacccaaagtcagcttgataattccaggaatggttgaaactttattatcaaaaatcctaatccccgaagccttaacagattgaatcttcttacttaaagctaagtcatttgctaattctggcataatttttcctcttataaaatattctctaagccaataactagttcagttaattgatctactttttctaaagcaactttaaccccactcataaaggaatcacgatcaaatgaatcctgtctaatggttaaagcttcgccaggtccaccaaataaaacttgctcatgtgcaatatagccaggtaagcgtactgaatggattttaattccttgataatctccaccgcgaacattggctaaagtctcagtttcatcaggcgcagtttgatgttcaggacgattttgcgcgatcatttttgcagtagctaaagcagtgcctgaaggtgcatcttttttatctgcatgatgcatttcaataatttcaacatcagggaaatacttagcagcttcttcagcaaacttcattaataaaactgccgacattccaaaattaggtgcgattaagccacctaatttttcctttttggctagttcaatcaaagttgcttcttgatcatcactcaagccagtagttcccacaataggtttaatttgatgcgttaaagcaaaataaacattgtcatagacagctgcgggagtagtaaaatcaatccaaatatctgcagcatggtcaggaatttgacttaattggttaaaaatttgggctgttttaggtaaatgatatctttcaggctcatttactgcctttggagcaaatccagccaccaattcaaaattgggcagctgattaactaaactaacagccttttgccccattgcgccagtaaacccagctattagtacttttttaggcatctcgtcttaccaatcctttcctaaattaagtggcaacttttgcatcaatgcattagcatttaaacctaaatgctgggccaacttttctttttcctcatcacctaaagcgactaatggcaaacgacatccccctactataaatccttgagcattcaaggctgccttaacaggagctggtgaaggatacataaacaaagcctgcattttcggcgttaaccagcgttgaatcgtgcccgcttcaggataatttccttcataaagatcatcaaacattcgccgcatttgtttgcaatataaatggctagctacggaaataacgccattggctcctagtaatcttgcaggtaacgcttgcgtatcttcaccactaaataccaaaaaattaggatctttatgatcaataatgtattccatttcttctaaagatgcacattgtttgattcccttaatatttttaaggcgtgataattggactaccgtttctttttccatttttacgccagttctaccgggaatgttataaatcataattggcattttagtctgagcattaacagcactaaaatgtgcaatcatgctacgctgatcaggcttattgtacggtggcactactactaaggcataatcaattcctttaatctgtgctacctcattggtgaaggcgatagtggttgcagtgtcgttactgcccgttcctgcaataaccggaacacgtccattaacaatttgaccaaaatgctggtacaagtctatcttttcatcatgagtcagagttggcgtttctccggtcgtaccaccaactacaaagccattgcaaccttggtcaattaaataattaaccagcttttctaaactggcaaaatctattttttgattctcatcaaatggcgtaacaatcgccgttaacaaatctgcatcaattaatgttgccattttattgcctcattctattaatcaaaaatcctttgattgcatcaacgccgcgctgaatgcttttctcatcaggattaagtgtagccgtatgcaattgtgaatcaggattaccaacacctagccaaaacattgttccagggaatttagccagcaaaaagccaaaatcttcacccgtcatttttggttcagtagtaataaagttaaccgtcggctggcttttcatatatgaaataaagttcttggttaattgtgggttattttctactggccaatatccaccttgattcaagtctaacttcacttctacaccaaagcttttctcaataccaagacagatttctttgagacgttgatcgattgtcaaaatcatattttgagttaagccacgaatcgtgccctcaattctagcttgaccagcaattacatttctaatcgtaccagcttcgattttgcctagagtaataacaccactttgaattggatctatgcttcgtgaaataatagtttgaacctgcatgatcaaacttgctgctgcaactaccgtatcatttgcatcttgcggaaaagctgcgtgtccacttttacctagaatatcaatattgacttcagttgtaccagcaaaaagtgtacccatccgacacccaatgctaccagcaggcaaagcggggttatcatgcaagccatagaactcgtcaggtttaaattgatcatgaaaaattcttttttcataagcttgcatcccaccactttggctttcctcggctggctgaaagaaaaaaagcaaattatcttgtggctgattttcactaaaatagcttaacaaacctaatgccacggtcatatgaatatcatgtccacatgcatgcattactccctcatgttttgatgaaaatgccagtccagttttttcagtaactggtaaagcatcgatatcagcacgatatcctatcgttctgtgtggttttcttcctttaactaatactagaattgcggtaggcagtgtcgacggtatctcaacttccaaataatcttgcttaaatttttgaattacctcgattaaataatcatgtgtttctttttctgctagtgctaattcaggtatttgatgtaaatgccttctaatttgaattaactcactttcacttaaaactgacattttataactttctcagattatcttctagttccgtcttactactagttttttcatcaacttttttaataattttagcaggaacgcccgctaccatcgtatgtgctggcacatcatgagtaactactgctccggctgcaataacggctccttcacctacatgaacaccctcaatcacaacagcattagccccaatcatgacattatcatcaatttgaaccggtttagctgaagcaggctcaattacaccagccaatacgctaccagctccaatatgacaatgttgtccaacaatggcacggccaccgagaactacgcccatatcaatcatggtattagccccgatttctgctccaatattaataatggcacccatcataattactgcattattaccgattaccacttgatcacgaataatagctcctggttcaattcgagcattaacttttttgaagtccaataaaggaactgctgaatttcgtgcatcattttcaatatggtaggccgtaatttgatgattttcttttaaaaatggttcaatatctttccagtcaccaaagatcgcgccagaatgagcttcagtaaaattctcaatttcctttggaaaatcaatttgtgctaaatctcctttaataaagacttttaccggtgtcttttttggtgcattaccaatgtaatcaataatactttttgcatctaactttgatacattccctgtcaagtagacagtagaattacataaagcttttattcctcagttgattaataatcagctgaggattttttggcttctcttattttcttttcgtgtattttttgccagtatttctcaattcgatgatttggtgcaatagggcaattcttaatattgcctttcatcgcttctttgcgcatttcaccagcagttaaaccgttaaaacgtttctgtggatcttcattaatgtagtaatctattgtcttacaaatagaatcattaagttcatcataactggccacttgaggatgaagaataactcgcatttctttgataatgccttgccagccttccattggaccattatcaatacagcagccaacacgagacattgattgcgtcatgccttggtcttctaattggttttggaaaggtgcgcgagtaaattgaaaaccacgatcactatggaaaagcggatgagcattagggtatgctttaacagcctgcttataggctgcttgaactaaagcagtatcgtttcgtttactaattgcgtagccaacaggatagcgatcatatagatcaaacacagtacatagatatgccttaggcaggttagcagcaacgacttcagtgatatctgtacaccatttttcattaggtctagatgcattaaagtctctttttaacttgttttcggccgttttctcaggcgttgtatgcttgaactttagcttctggtatctaggcttttgtgatctaatgccattgatacacatcaagcggtaaacagttttatgataaaccggcttttcatcagacatctgtcgattaactgccatggtcatcttttccgtcccaaacagactgttgttagacttggttatttcaatgatctttgcttcaatctttttgtctcgttcttcacgcttactcggcttgcgcttaggatcaaagtatttgtaataagctgagcgtgctattttagcccatttgcacattaaatcaatcttccaattgtacttttgatggcagtcatggattaactgatatgtttcttgtttccagcgtctttttattgcggcttgtctgtatcttggttgtccggcaagcacatcctttctaactgatctaatttttttaggaattcgttcttagtttgttcttctttgagctgacgctctaattccttaatttttcgattagccagttctaactcagttagctcttctggcttcttatgtctgcctcgtttatctgttaatcctgtttcaccattagctagatatttgtgtgtccagctgtaaacctgctggtaagaacaatcaaatttgacagctgtttgagtgtaattcttgtcgtgattaagacagtattgaacaatctgaattctttcttgctgggtagtttttcttcttgctttagtcatatagacctccggatggggatcatagtcccgattttctatatgactattatacttggaaacccattctgatactgttccattgcttctaatgccatatttattagctaaagaaggtaacgacattttgccagctaaatattcttgaacaaccttttctttaaatgccttagagtaatgattattgtattgagcattacttagaagggtatcacgattgctttgatattgatgaacccatcttcttacttgcatcgctccacttttacttggcatcttaagccgtttagctatttcaacgctgctcctattaccattcaagtattgttcaactgcccatatcttttgatcgaatgaatatttactttttctggacataaaaaatcccacctccatggataattgaatactttatgtatttcaatcgtccactttagtgggattgtatcactttgccatcttttttctcttttctaatttaaatatgattgatctaaatgaaccaagtcttctaaactttcacgcttaatgactaattttgccttaccattttctgcaaataccactgctggtcgaggattacgattataatttgaagccattgaatacccatatgcacctgtatccaacatcgctaacaagtctccagctttgacttgtggcaaagcttgatcttctgctaatatatcgccactctcgcaatacttaccagcaatacgaacatgttcagtcaaaggcgcttgtggatcggtggctaaaactgtttcatacttagcctgataaagtgcagggcgaatattatctcccatcccgccatcgacagtaatataagaacgataacctggaatatccttacggctacccaccgtataaaggttgtaaccggctggaccaacaattgatcttcccggttcaatatcgatttcaggtaaaggataattcattttttcagcttcagttttgatcaccttaacaatcgtcttaacaaattcttctggtcgtaatggatgatcttcttgggtatatttaatcccaaaaccgccaccaacattaataacttgtgcaagatagccatacttttctcgccaatcttgcgctactaccattaatttttgtgctcccatttcaaagccgtttaaggcaaaaatctgtgagccaatgtgagcatgaatccccaacattttcatcctaggattagctagaacttgttttaatgccttttctgcttgacctgattcaagatcaaagccaaatttactatcaatctgacctgtttgatcatattcatgggtatgtgctgaaatccctggtgcaatacgcaacatgacactaatcgtagcatcgtacttttttaaaacttgcgccaataactgaatctcatgaaaattatcaataataattttgccaacatgattttttacagccatttccaattcagttaatgatttattattaccatgaaagctaactctctccattggaaaattggcttttattgcagtaaataactcacctgctgaaactacgtcagtgtatgctccctcttctgcaataacttgatacattgcgattgctgcgaaagctttacttgcataactaacagcataggccatgttttcttcttcaaaaactttcttaaaagcccgaatttgtcgacgaatttgatcgacatcataaactactaatggcgtaccatacttttgagctaattctactatatcaactccaccaatcgttaaatggccttgctcattaatctgatctactgcaatttgtgaattcattttgttctcctgtctttttcaggcgaaacgctaataaaaaatccattgtctgcgccaaacaaacaatggattaatttctacttaatctatggtcgatagcgctccgcgaattttgttcgcgacagtccgcagtttattcaactacgccccagctcaagcctttagcatgactcagcttcggcaacctccccttttacaattcatcttcgttttgcccaactcagaattgttacttatgtcggctgcgcctcttcgattgactgtagtttacaattttataaaaacatagtcaacaaatttattataaaaatttaattttatttgtaacaatgcggcatttagagtgataaattacagtcatcacttgcaagattaaaaaataatgttagaattcaattaaatttagtctgacttttttatttaaattaatgatttctgaaaacaaaaggagttttgaaatgaaaatcgtaaagtttggtggctcttctttagctaccggtgaaagtgttgcacaagcaattcaaattattctcagcgatcctcaacgacaagtaatggttgtctctgccccaggcaaaaggaatacaacagatatcaaagttactgatctgttaatcaagtacgcagatttagccttaaagcacaagaattgtgttgaaatcgtgaataaaatttttagtcgctatcaagaaattggtcattattttggcttagctgatacggaattaagtattattaaacaaattttattagagttgcccaatcagggttatcctaacgaaaaatatcttttagctgcatttaaggcacatggtgaacggcttaatgctcgtttaattactttaattttacgccatcaaggaattaatagtcgttttcttgatccggctgaagccggtttaatcgtgactggcgagcccaatgatgccattgtcaatccagagagctacttaaatcttgaccaaattaaaattaaggctgatgaacgtatcgtatttcctggcttttttggcatgactccgtctggtaatatcgccactttttcccgtggcgggtcagacattaccggggctattctagctcgcggctttcatgctgatctctatgaaaattttacagatgtcaatgggatttttgccgctaatcctcatattattgagcatccccaatccatcaagaaaatgacttatcgcgaaatgcgagagttgtcatatgctggcttttctgtttttcacgatgaagcattgattcctgctattcaaggacagattcctatcaatgtgaaaaatactcatgatcctagcaatcctggcactatgattgtcccagaaaaggattttgtcccagataatgcaataaccggcgtaaccagccaaaaacatttttccgcattatatttgcataaatatttgctcaataaagaagctggtttcaccttacgtatattacaaattttataccaacataatattccatatgagcatatgccatctgggattgacgatattaccattatttttaacaatgattttctaaacgatcagttaattgatcaaatttgtaatgaaattcaagctacaattaatccagatcaactcgaatggattgaagattatgcaattattatggttgtcggcgaaggaatgcgacaaaaacataccatcagccgtcaaattatcgattctttaggcgatcatgatatttcaccacaaatgatcaatcagggagcttctcaaatttcaatcatgatcggtactaaaaaagaaaaggctgatgaagcagtaaaaattatttatcaaaagttttttaattagggggcattatgattaatttattcaaagttcacggttcgcaaaatcatttctttattcttgatcaaacacaattcgaacacgaattaagtgacgccgagctaaaaaattttacgcaaaagattaccaatccacaaactggactgcttcacggagcagatggcgttttagtagttaatcatcccgtgcattctaactcacttggccagatgcgtgtaatcaatgctgatggaagtgaagcatcaatgtgtggcaacggtctacgcaccgttgctcgttacctaagtgaaaaaacgggaaaagataatttcctagttgacacaatgaatgccagcttacgtgttagaagagaaaaagattttgcttctaacgtgccagcatttgcagttgagatctctcctgtacgctttaataaagaggcactcccttttgataatttaggacaagaacggattattgatgcttggttgccagaaatttatcctggattacgttttacttcaattgccgtacctaacccacatttaatttcttttgttaatcaagcagaaattaccggcccgatcttaggcattgttggtaaaaaattaaatagcaataatccctactttacagatggcgtcaatgttaatttcgcgcaaattttagataaaaataaactttttgtccgcacttacgaacggggcgttggttttaccaatgcctgtggtactggaatgtccgcgacttctcttgctcttactttaacccaccccgaaataggcaacttaaatacaccaatatcagtttataatcctggcggtatggttaaaactatcgtgcattatgaaaaaaatagttattggatcgagcttattggtaacgctacttttactcatcgaattaagctttctgaagctgacttaaggaaaggtgatttttccaatgtccagatccaaaagactgctgaacaaagtgcttatgaaaaatttattgctaatctgccaaagttcaatgacattacaactttagcgtaaaaaaatggcttgcaacacgcaagccatttttactttttaattattaatctaagtctttcaagccatgctttttcttggaaacgcgataagctactaaaccaaagaaaattggaccaaagcttgtccaaaaagcagttgcatatctatgctccaaaactggttgcaaaaccgtaaatataattccggtgcaaacaatcagctcaacaaagactactaacgcaaccgtccatttatagttagtaaacactctaaacttgcgcggataatcttttttaagaaagaatggaaatgcaccgatcaagaaaatataaggtgcagtagcggctacgttacccatatccgtcagaatttgataaaagctagtcgctgcgctaccaccgaatgagaccaccgcaattaataggcaaacgaagacagtttgagcccacatcgcattagcaggaataccgtgtttatttaatttagtcgctgccttaggccataaacgtggatcagatcccatgatgaaggatttaattggtgaataaagcaaaacaaagagagcacctgtcattcccatcaaaccagataaagcaattgctctagtaaagaatttaccaatcaataaactcgtgttaggatccaaatgaagtgcggttccaaaggctttgccaagtgtgccatatacggtatacgtaatatttccagtattggcattggctgctaaaatatctttttgataattaactgaaaagccggtcataaaaatcatcaaaacataagaaataatagtgaacaatgacccaataattaagcctttagggaaatctttttctgggtgtttcatactgtcaatcacaccaccgacggtttccatcccaccatatgcaaagactgcataaactacgaaagaaataatcgtaattggcgtttgaaaacttttattaggcgaaataataaaactttgccacccagtaatcggctgagccaattgcccatgattcataatcaagaccgttaaactagctagaataaagactgcattcattacaatcatgaaccaaccaccgattgatgacataattttaattccagttatccctctggaagacaggtacgttgatacaatcatgaataaaattgctagtacacctatcaattgagtaccatgcaagcccaaaatattccattcttgagttgtatctttgccaaaaataagggcagagattgaaatccaaagccttgaggcgcttgcaaccagccacagcacccagttagccagccatacaaaagtcccaataaaggcctatttttgtccaactgagccagctaaccatgaataaataccaccttgagcatcatgaaaagcagacccatattctgccatcattaagccagctgggaaaaagaaacagacgccagccaaaataaaccaaatgatcccagcatatgtcatttgctcataagaaacagaaacattgccaaaaccataaaccgttgtgataatcatcaacacaaggctcatagtcgtcaatgattttttagtttgtgaattttcatcatccaagataaagcctctactttctatttacactttccattttagcatcgtttatcttgaataaatttattctaattttaggctcataagaaaaaactactagttattcactagtagcccttcatttttattcattaattcttttttcaatccaattacttaattcagttacatgtaatttagtgaccgaactaaaagtcaaaacggtgacatgatcatagttgagattcaactttttctttaagcctgacatcaccttattagtttgactcttttttattttatccatcttggtacaaactaccaaaattgggatatttagatattgagcataatcatacatagcaatatcatctttggttggttcatgacgactatctactaagataattagtccctttaggttgggtctagtttctaaataatcttgaatcatttcgccaaattcttgccgcttcttctgtgaaactttggcatagccataacctggtacatcaaccaaataaaatttttcattgactttgtagaaattcaaagtttgtgtctttccaggctgtgacgaggtcctagctaagtttttacgctttaatagggtatttatcaagctggactttcccacgtttgagcggcctgctaatgcgatctcaggcaagttatctttaggatattgatcttctctaacagcactaactgcataactactgctttcaatgatcattgacacttacctgttctttattatcagtatttttgcggattacctttggcttagcgtgcttagtaattacgtccttagttacttcaacggtctcaatatcctcttcactaggagtttcatacataatatccataattgaattttcgataattgttctaagtccacgtgcacccatatttctttggattgctaagtcagcaattgccttcagagcaccatcagtaaacttcaaattaacatcatcaagtgataacaacttcttatactgcttaactaaagcattctttggttcagttagcactctgaccaaatccttactactcaatttatcaagcgtagtaataattggaattctaccaatgaattcaggaatcattccaaatttaactaagtcagctgtagtcaaatggcgtgtccaatcatctgcattaattttatctgcctcattttcagcaccaaagccaatggtctttttacctaaacgatttttaacgatttgttcaattccgtcgaatgccccaccaacaataaatagaatgttagtcgtgtccatcttaatcatttcttgttgagggtgtttacgcccaccttgaggtggaacagaggcaattgtaccttccaagatctttaataatgattgctgtacaccttcacctgaaacatcacgcgtaattgagacattctcagattttttagaaattttatcaatttcatcaatataaataatgccacgctgtgcacgttccaaatcataatcagcattttgtagtaacttaagcaaaatattttcaacgtcttcaccaacataccctgcttcagtcaaggtagttgcatcggcaattgcaaatgggacatttaaaatacgagccaaagtctgagcaagatatgtcttacctgatccagttggtccgatcattgcaatatttgatttttgtaattcagttgaagaatcaacatccatttggctaattctcttatagtgattatatacagcaactgataagacttttttagcacggtcttgaccaataacatattgatcaagttccttttttatttcaacaggcttaggtaattcacgagctgctttaagtgaatctgctcgtaattcatcgtcaataatttttttagccaagtcaacacattcattacaaatatatacaccgttaccggcaatcattttcttaacttggtcttgagttttgccacaaaaagcgcatttaatctcttcttgatctgtaaactgatttgccattatttttcctcctatatctaccaaaaatcagattatcataaattaactaatattgataaatattaagctcgaacagcaaaaaaagcggcctatagccgctctttttgagaaattagcaaatattactattacttgctttccttcttgtcatcgtcttctttgttttcaagctttgacttagcaacttgcttagcattatcagtaataagatccatagccttacgtacagtaatgtcgtggcctaacatgtcatctgataaggtgttacgtaccatcttttcatccatgttgtattctgaagcaagatccttgatttctttatcaatttcttccttagttgccttaaggtcttcagcagcaacaatagcttcaagaactaagttagttttaactctttcagctgcattcttttcaaattgtgaacgcaattgttgttcgttggtattagtcaacttgtagtaagtttgtgggtcaataccttgacgttgcatattacccaagtattggttcaattgagtatcaacatcttcttgaatcatagcatcaggaatttcatcgatagtagcgttgcttacagcaccttcaattgcagcttcttgaatagcgtcgtttgcttgttgttccttttgttccttcaagtccttcttgatcttttcctttaagtcatcaagggtgtctacagagtcatcaacgtccttagcaaattcatcgtctaacttaggaagttgctttgacttaacttcgtgaatcttagttgcaaagtgtgcttctttaccagctaaatcctttgcaccgtaatcttcagggaaagttacaactacatcaacatcatcgccggcttcatggccttcaagttgatcttcaaagccaggaataaatgcacctgaacctaattcaagtgagtagttttcagctgagccgccttcgaatggcttgtcgtcgatagtacccttgtaatcgatagtaacagtatcgcccttttcagccttacccttcttaagaacaagttctgcattttgttcacggcgcttgtcaagttcagcatcaatgtccttttggtaaacacgagtgttttgcttaggaacttcgatacccttgtagtcacctaacttaacttctggttctacagtaacagtagccttcatagtccaatccttgtccttatccattgatacaggaacaatttgtggttggccaactgctttaatacctgcttctttaacagcagcagaatatgcatttggtaatacaatatttaaggcatcttcatataatgcttcttcaccgtaatattgatcaaagatcacacgtgatacgtgaccctttctaaagccaggaacacgcaagtttttctttactcttctaaaagcttggtctaaacctaatttaatttcatcttgtgaaatatcaaaagtaagatcaccggttgtcttaccggtcttttcccatttaacagacattaattaaatacctccaatgtcaaatttgagtttgcatcttgcatactaagttatcttaccttaaaaggccgcaaaaaacaaatttaaaagaaacatactaacctagtgttggatcatgaatcgacggattcacgatctggcactttttattttgtctaaaatagaaagtgaagataaagcaaatcaagtcttcagctttttagacacttgatgtcgtaaaagaaacggactgctttaccacctattcttaagtctcttcgaagtctgtgggcacttagatgccgtgtttagaaaattagaattaataggttgataaagaggtttatcttcacagcggaggttatattatggaatcacaaattattttcggtattgatgttagcagtaaatcttccacagtttgtgtggttaatgaccggatcaaacaaggcgaatcttttagaatctctaatgattcctttggctatcaaaaactttatgagcaactgaaccaatatttgataactcctttagttgttttcgaagctactggtgtttattctctaagcctgcaagctttcttagaggattatcatattaagtatttgaagcttaatccgcttaaagcgaaaaagctaatggacaataatttacgccataataaaactgataaggtagatgcttatcgcctggctttaattcaatttaatgccccgcaaaagctgcgtgatccacagcccagagagtatcatgaacttcagaatgccagtcgctattatgaagaacttactaggagtatagttactactaaaaatcaattgcaccgcaacctccaatccactttcccacaaattgaagaaatactgtctcatccatctggcagaatttattgggcgcttgttagtcttttcccacatgctggatatgttctagaaaagaatgagacacaggtaactcaaatgcttaattctatttctggaataggacaacaaagggcacggtacttaaccacaagattatacgcttttgctagagaagcttatccttatgattccaaagatagtattatcgttagagctattcaaaggaacatttctaatttattttcactccagcaagaacgcgactatgtaattaactacatggaaaagctggctaaagcagtaaacgctcgtgctttatccatctatttgagtatcccaggggttgctagaattacagcagtgagattagtagcagagctcggtgatctaagacggtttagcacttcagctcaaattgatgcgtttgttggcattgatccaggaaggtaccaatctggtgaaaaagacagttctcttggcattaccaagcatggcaatcatattgccagaaaaatactttatcgagttattactcaaatggagacggtaaaggctacgcagccttgccatataactgattattatgacaagaaaaaacgatcttcaaatagacaaggctataagaaaatcgccattgcatcagtccataaactgatacgcacaatgtttgctcttatcaaacatgatcaattatatgattacaacatagccaccgaaaataaaagactttagctgaaatcaaataatcaacttaagtataagcaacctatggaaaaactacaagtattcataggcttatttgtggtactttcgctttttcttaaatttaaactcttatttgctttaaccttattcgcatcattaaaacaagtaaatttattttcttaaatcattgataatacttgactttgggtagaaaaaaagatgcgctcctgtgaagaagtgcatctttttttaactatatcgttagaaattagtcaaggatttcagtaacctgaccggcaccaacggtacgaccaccttcacggatggtgaacttagtacccttttcgatggcagctggcttgattaacttaacagtaaattcagtgttatcaccaggcataaccatttcagtaccttctggcaattcaatttcaccagtaatatcagtggtgtggaagtagaattgtggacggtagtctgagaagaatggggtgtgacggccgccttcttccttcttcaagatataaacttgacccttgaattccttgtgggtttgaattgagcctggagcagccaatacttgaccacgaacaacttggtcacggtcaataccacgaagcaatacaccaacgttatcgccggcttcacctaagtcaagagtcttgtggaacatttccaaaccagtaacaactgacttaagaaccttgtctaccaaaccaacgatttcaacttcgtcaccgaccttaacagtaccacggtcaatacgacctgaagcaacagtaccacgaccagtgatagtaaatacgtcttcaactggcattaagaatggcttgtcagtttgacgttctggagttgggatgtattcgtcaacgatgtccatcaacttaagaatttgttcttgagcttccttgtcgccttgtaaagcctttaaagctgaaccacgaacaactggaatatcgtcaccagggtaatcgtattcagtcaacaagtcacgaacttccatttcaactaagtcgatcaattctgggtcgtcaactaaatcacacttgtttaagaaaacaacgatgtagttaacaccaacttgacgagcaagcaaaatgtgttcacgagtttgtggcataggaccatcagttgcagcaacaactaagatagcaccatccatttgtgcagcaccggtaatcatgttcttgatgtagtcggcgtggcctggagcgtccatgtgagcgtagtgacgattttcagtttcgtattctacgtgggcggtattaatagtaataccacgttccttttcttctggtgcagcatcgatttgtgagtaatcttcagccttagccaaacccttgtcagccaaaacagtagtaatagccgcagttaaagtggtcttaccgtggtcaacgtgaccgatagtaccaatgtttacgtgtggcttagttctaacgtaatgttctttttctgccattaaaatgaccctcctgtaaatttgcaagaagtccgttgagataagttaacggataattctctgttgaatattgtactactttcttcggcaaatgcctagtaaaaaagcttaagcgaaattgcctaacgaaaatatcctttgctaattatactaaatagtttgaaaatgtaaaccttttttacttattttttattgcggtaagtatttatatattttttctagtaatttttgatgactacggccatcttttctttgtaaaaatgagactaaatcactagcaaaactgtcaggctcatcaatatattggttaattttagggtaaagactgcctaataccaaattcacttctcccagcattaatggcaactgacttggactattgtgaaatttgcttccaatgctagaaataatttcacggtacttaggttctttttctagaagcagtgtattcgccggaataaagctctccatctggcctattacccaaatttcaaacttttcttcaagtcccaagcgaactaagtcttcacaaagtgacaacctaacagcaaaatctggcgttggatctaataagacgcttcgtgcaaaagctttaaaattaggcaggtttaacttatgtaaactttcataatccgactgagtaacctgttctcgttgtttaaagttttgcataatctgccgctgtttttcttcagaagctggttttaccttttctgataagtccacccaaacaagattttttagttgtagagcttcaataaaaaaattatttttagctagaatttgacagtaacttttaaatactcgctgatcagaaaaaagatcaggctcctctttaattaaagcatatgcctgatcttcttgtttattagcgcaatagagtttgcagagtttcaaaataacgtccaatgaatgctcttcacgtaatgcttcttctagattttgaatagctgcttcgagatctcccttacgctcatcttcttcagcaagtttcaataaattttgttggcttactgatgtcatttttagtctttcttattactttcttttttcttatttattttttttattttcgtctttggcatggttcttattgtcattttgtgctttttcattgcgtttctgcatagcacgatgacggttttgatttacttccatgaccacgggcaagatcactggacgacggttagttttcttgtataaaaacttctccaaatcaccgcggatatcttgcttcaattcagtccaatcaaactttttgtgttcaaaattggcctgaattgcttttttaattacatcaattgaatcactcatcaactggcgattagccttgatatagacgaaaccacgactagtgacttttggctctgcaataatctttttcttcttacggtcaattgtaacaaccgcaataaagattccgtcatctgataggacctcacgatcacgtagcacaatattaccaacatcaccaacaccagaaccgtcgatcatggtatcttcacctggtactgggtcagttaagaagaaacgcttctgcttaaagtcatattcaagacagtcaccattcttggtaatataaatatctttaggattcattccagctttaatagccaaatcacgtactacttcaagtaaacgatattcaccaattactggaattaagaattttggcttcaaggttgtaatcaaaagttgcagatcacgaccagttgcatgcccactagtatgtatatttctgcctaactggataaccgtaccgccagccttatataccaaatcactggtttcagctaccatcgtttcaaccgcatgtgacggagtagttgcaataaagaccaaatcgcccttatgaatcgtaatcatactatgacgcttcttagccattttttgtaatgagttaagtggttcacccatacgcccagtctctaatataactgtctgctcatctggcacagtcttcagatccttaactcgcatcaacaagccttcaggcacatctaaatagcctaatttcattgaagttctaacaatcttagctagatcgcggccagttaataagacgcgtttccctgttgctgctgcagcatttaaaacttcttgaacacgattcaagttagaggctttagcagctacgataattctgcctttagcatttctgaagacattagtcacaaatttaccaatatcttgttcagatgcattagggaaagatgcttctgcattagatgaatcacttaaaagcgctaaaacgcccttttgttcaatttcagctaagcgatccatatcagtccgataatttaacgcagctgttggatcaaatttaaagtcaccagtataaacaatttcacctgctggtgtatgtacatctattccaagtgaatcaggaattgagtgtgtcgtatggaagaatgaaatacttgcattcttaaaatcaatttcagtatctgcatcgattacgtggaacaaactattcttacggcgtttgttttcgcgttgtacttcaattttagcaagttcgatactcaattgtgaaccaaatactggaatatcgtatttacgcaaaatgtatggcaatgcaccaattgaatcagcatgcccatgtgttaaaaagatacctgctactcgatctccgtattgttcaaagaaatcaaggtcaggaattactacatcgataccaaataaagaactatcagggtactttaatccggcatcaagaacaaaaatttcatcattaacttgaacggcaaacatgtctttaccttgttcacgcacaccgctcaagatcataattttgatttgatcagccattatatttccttttctatctaatttttaattcttatggatctatcgatctcaacgtaaaaataatctgtttcaattttagcataaagaataaaattatgacagagacaaaaaaagccagccttttcggctagcttcattattcaatattatgtgaaaattaacgacgaagacctaacttcttgatcaattcacggtaacggttaatgtcgttgttttcaaggtaacgaagcaagttacgacggtgaccgatcttcttaagcaaaccaacgtatgagtggtggtcatgcttgtgactcttcatgtgatcagtcaagttgttgatatcagcagtcaaaagagcaacttgaacttcaacagaaccagtgtcaccttcgtgagttgcgtattccttcataatcttttctttttcagtctttgaaattgccatagttaaattcacctttcattaaataattgccgttaacaacgtttatcgtcggcgtgaacaaataaacagcgttagcggttcacaacagtcataatcatacacattattttttaaaaaagcaagcagaaattaccttgcatccgtgatatttcttaagtataatggatgaagtaaatttctaaatcattggaggtgaatttcatgccacaaatcaaatcagctatcaaacgtgttaaggctcaaaatgctactaacgaacgccgcgcttctgaattaagcaagttaagaactgctatcaagaagtttaagaacgctgttgaaagtgatagtaaggaagacgtctccaagttgcatttagaagctgaacgtgctttggataaggctgcttcaaaaggcttaatccacaagaacaaggctgctcgtgacaagagtcgtttaaacaagttagcaaacaagtaaatcttacttattactaataataaaaagaggagatctgcagtgatctcctctttttgtatactcttagacatttaagataaataatttcaaaaaattatcttctcggtaagttccatttttatatttaaattctaagtcgattgcatcccttaataaattttctagcttgtctatcttcaaccgattacgtagggctaacttaaccctatagggatgaacgcctaattcttttacaatttgtggttcgctacgacctctttgtgctaagatcttaacgaccaaaatcaattctaattgattttcaaagaccgctaataattgaattggattagtcccttcacgtaattgattatctaagcgctcaactgcttcacggtaattcttatctaaagccgactccaaaatagcgaaaatattttgtgctagggacaaatctacattttgcattactgatttttcagtaattttgttatcggtagctaccatttttagcttttgataattgcttaaaatagtgtcaattacctgatcactccgctcaattagcagctgtaaagctgactgtgtgattatatatccctcatctttgatcaaggctttagtcgttgaagcaacttcatagggcctaatttgtggctcaaccacattgaattgctttagaacagttttagtcagttttttacgcctatcaattttttcataagaagcaacaattactactacatcttctaaatcagctaagttttcaaaaatcttttgtaagtcatcaatttgtttctgtaattttttagataccttagctgttaaaaagaaaggatttttgactacaataaatttctgttcactaaataaactggattcagttaagctcgcaatcaattcatctaagccatcgctttcgcaatcgacagtcacgtgctccaaatctttaaagcgatcttccttggcatatgatctcaccaagtaatcattgagaaagtcatctgcaccccaaattaaggtatgtggattattgttatttgtatttttaaacaaagaaagtaaggtcattttttatcccgctttaaaaagtaactaaatctaggactttgcagtccgccataataccagctaatcataccacagtcttgcgttgaaacccatggtatttgctgttgagttagtgtcgttagcgtctcttgatgggggtgcccgaacctattttttcgaccagcagaaataaaaacttgcttaggatggattgcacgtaaaaagtctggattggatgatgttttactgccatgatgacccaatttaaaataatctacctgaagtttcatcctctgcataatttccttttcaccatcttgacctaaatctcctgtaaacaaccaattcttattcgctactctaaaaagcaaactcagggaatcttcattctttccttctcctgcttgatatggataaaccacattaaatgtaatctgcggttctttcacccgcattcctgcaagtaactccaataatttggtatcttttacacgaccatctaatctcttttgaaaagatggattcttaattagtccttcggccataaataatttcttaacattaacctgctctagtaatggtcctaaatcaccaacgtgatcggcatcttgatgcgaaacaaagactccatcaattgtattaattccctgacttttcaaaaatggaatagtaattcgatcaatctgaggtgtctgctttttgccactaaagtttagtttcccaccagtatcaattaaatataccttgcgaggaaatggcgtagtcactagaatactatctccttggcccacatcaatgaaggttacttgccctcgcaaaggaaaatgaatcatgctgaagaaaattacatacaagctcaacaagcccaccataattttcttactattaaagcgccagttaactttttctcttaaagaaacaattaaaataatcgttactattaatagcaacagacactgccaccaattaatttgcccaaaagttagtagtcccaacttagtagcagataattgcccaatgattttctcacctaattcaagcactttttctaataccggagcaaaatctttagtcagaccaaacgtcacaatattgaaaaaagcaattggtaaaactatccaattgaaatatggcactactaacatattaaaaattacagttaaaaaattgacctgataaaagaaaagcaatagtaatggcgttaataaaatatttaacaaaattgcttgtttaaaactgccaaacttatcagttaactgtaaacccaatgccaaaatatagctcaataaggctccagttgccagaaataaacgcggtactactaaaagatgtaaaatgcaggtcaatcccagcagatctatcgacgcaacatgatatttcttaaacttacaaattttgcctaaaaagtaggttaaactagctcttacaaagccggcttgaccattgcttagaaaaatacctagcaataaaaccaatgtacagcagacaaaagtttcttcatccgtcagtttcaagttaaaacaaaatacactaattaacaagacatagattccaacatgtaagcctgaaatgcttaacaagtgaataacacccaaatctcgataattatttagtatttcttgattttcttgagcattattttcacccaagattaattcactagcgaaaaagcctaataactgtggcatcttggcaaaatagttctgcaattcaaaacgtaattgatgcaattgatccccaaaatcagtaatcgataatagcttcatttgacaactactgtatttcaatttttggtaaatctgttttgcctgataataattctgaaaattaaactcaccaatattagttgctggctcaattgaattgcattccccattaatttctgtcactaaaatagggttcccatgcttaagcagttctttttgaacatctgttaccttgccaccaattaaaattttaccttgagcgaaattacccacacctgttaagtagtcgtctttaattcttacctgatcagggtaaattcttaattggctctgctgggttaaaacaaaattggtttttggtttacttaaaaaaatcagtaatagaaatgctccaactattagactaactatttttaaactaactcgatatttttgtactaacagtagcaaaaagtaacccagaaaaaataaagctactattttttgcaccattgttgtacaagaaaaagccaaaaaagagattgtaattagcaacaaagcggttattaagtaaaagccaacttcatttttaaacagccaattgatctttaaggctcgcaaaagttttttctcctattcctgatacctgcattaaatcttctatctttttaaaagaaccattttgttcacgataagcaataatctgttctgcctttttttgaccaattccagttaacttttgtagttccgttacattagcagtatttaagttgatcttagtgccatccccttgattacttgggctactgctactagtactcccactattttgactattatcagctgatcctgcagttgccacattttcaaccttttcacccttgtaaggaatatgaattttatcttgatccttaagcaaagtagcgcggttaatagcttttaattgtgctctagcagtagtacctccagccgcctcaattaactcctgcagacgagcaccatttttcaatgtatatactccctgatgcttcaccgcaccggaaatatcacaagttacagtcttagaaacggttgttgaactactgctagtcactgcattagtattagtggttgcacctgaactactagtgctagactgcataacttgatcctgcactgcagcagcattttcttgatgatcccctttcttcaatccataaaatccaactacaagaattattgcaccaatgagatatgcttttttctcaagcacaaattcttttactttttcaaaattcataaaaatcacctctactatttattacgcaaaaaaagcccagaattttttctagacttcaaattttttgaatttttttagtagtgtgtctttagatagtttaatgcatcatcaaaagtgctcacagggacaattttcattttggtgtgaattttctttgcggttctcttagcaaccgcataattagtttcacttttcttcacactggttgaatcagtcggcgcaaagaagacctctgcaccttctctgctagcagctaccacttttttatcaacaccaccaatgattcctacttttccggtaggtgaaatcgtacctgttcccgcaatcttatgtcccttacctaagttctgcttggtaaagacctcatagctttcaagtgtaaacatcaatccggctgaggggccaccgatttcgccagcattaatttttaacttaggcttagttttcacaactacatgctcaactaattgaatcccaattcctggcttattagtaccctttactttaacaattttgccagtaaagtgtttctcttgcttaccacgcaaaactgagattgttactcgtgcaccaatcttttgtttacgcaaataatccatcatctcttcagttgagctgaaacgatgcccgtttgcgcctaaaacggtatcaccaatttggagcttatttttaaaactagaatttttctggacttccattacataaacgcctagatattttaagctatgctggttacctgcttttttagctgcataataaattgcattctgctgacttgtttccatataccagttttgcaactcattatattgagcactagtttgacctcctagcagctccttgcttgatacacgctcatcatacggacgagtaaaactccatagatattgcaaaaccggagccggccgactagttatgctaactgtcaccaaataaaaattattcggacgtttatttgatgacttaataaactggcccacgggcattgcctcaccaggatattcaatataataatcggtcggccaaacagcaagtaccactaataaaacaagcgcaattagtgccaagagccaattacgcaagtgctttttcgattgattgtttttcttattattcatgttttagcttctctctcaatgcaatcgctgcttttttaggtaaaaacagactaacatcttcatcaaaacgagctaattccttaatcatgcttgaagctacaaaagaattttctggactcgtaaaaagcaaaactgtattcacatctggagccaattttttattaatcccagcaatctcctgttcatagcggaaatcagcactgttgcgtacaccgcgcaccataactttagcatgcaattcatgtgctaaatttacagttacttcttccggtctttctagcacttcaatattaggtatttcccttagtgcatccctgattagatcagcacgttcttcaggcgtaaacaagtatttcttagctgtattggtcatcgcaactacatatactttatcaaaaatttcagcagcctttttagcggtctccacatgcccattagtaatcggatcaaaactccctggaaataaagcgattgtcattattagtcctttcgataaatcctcacaattgtttttcctaaatggtgttctttgatcaatgaaaaaccagtaatttcacccagttctgtatgatcatcagtttctgctaccacaattgcatgatcattaagtaggttcgactttaccatctgcaacatgtccttagcgattttttctttggcatagggcggatcaagaaaaactagatcaaacttttcatcattctcagaaaataattttaatgctgcagagctgcgcatattataaacattaaaacgctgctcttccttagttaaagcaacatttttcttaataattgtacaagcagcatgattaatatcaaccagactcgcatggtcacagccccttgaaacagcttcaattcctaaggcaccactaccagcatataagtctaaaacattaccaccctgaaaaaattgtcccaatgaattaaaaagggattctttcaccttatcactggttggtcttgtccgattacttttcaaagtaaataaatttcttttagcatatttccctgaaataattctcattttagttgattctcacttttttcttgttcaagttgcaatttcttttctgctttttgggccatctcagctaattgattttcaatatgttggctatccaaatttacttcttcttcagctgaaatttcgacatgattaacaaaatccaaatgagcaatttgtcctttgatttcattgcattcgttgcgattaacataaagaacacaatatttcatttttttagaaaaataaacaatgtcaccaaaatggcgcaacttatattgatcactaactgattttaaataaataatcaatgctacccttttaattaagtgggtactttcaatttctttattgatactcatgcaactgtttcatccttttcctgtaacattttttcatttgctgaaacgttcagtactaaaccaatcgcagcagtcaagacaatcattgatgaaccaccatatgaaataaatggcagcgtaacccccgtaatcggcaacaatcctagtactgcaccgatattaaagaatgcttctgtaaaaataatagtcgtcacgccaaagcaaattaatgcgtcgaattgagaaaccgcgtgaaccccaacttccataatctgccacatcaaataaaagagtaatccaaccaataaaattgtcagaatcacacctacttcttctgctgtaatggataaaataaagtcggtatacggctctggtaagtaacctcgcttttgcatactattacctagtcctacgccaaataatcccccattgtggattgcataataggagttaactagctgggccccacctttttgctctaattcaaagggatgcaagaacgacattagtcgttggaattgataacttctttgtaaaaatccaggattccaggcaactacaataaaaaatacagctgtcactaagatcacaatcccagctaaccaagttaaagctaatttagttggaacccctgatactgaaaacattactaaagtgatcataaataaaattgctgtcccaccaaaatcaggttcaacaataaccaaacacattaaaaaagccgccaaaattgctgggtgtgacaaattatgtttgatcttacccttgactaattttccatctcttctgtctagtacatatgacaaataaatgaccagagccaatttagtaacttctagtggctgcaaattgataaagcccaagttaatccaacctacagcaccattaactgccgcactactgccatgagcaaaacgtagaaatactagccatcctaacataagtatacaaattaataaaaatccccctacaaactttggatttttaaatactttgattcttaatgcaaaaaacggaatcccaaacaaaaagaaagctactatagcatagattgcttgccgtatcccatagacatttggcttaaatccattaactaataaaatatctgaactagctgaatataccaaaattatcccaaccactactaaaataagatagggaataaaaatctggtaattaagataacgtaattttcgacgcacaagcgttgcccctttatctaaataatacttttttcattataaaacaaaaagatcatcacttctatcaagtgacgaccttttaaaatttattaaactatcttagttagcacggttacgcttcttatcagccttttgacgttctgaagtgttcaaaatcttcttacgtaaacgaatagattcgggagttacttcacaatattcatcatcatttaagaattcgatagcttcttcaagagtcaacgttctaggagtcttaatagcagcagcgtggtccttaccggcagcacgagtgttagttaagttcttacccttagttacgttaacagcaatatcacgttcacgtgatgattgtccaacaatcataccttcgtaaacttcaacaccagcaccgatgaataactcaccacgttgttctactgattgaagtgagtaagtagttgattgaccttggttaatggataccaatgcaccattacgacgacctgggttccagttctttactactggcttatatgcttcaaaggtgtggttcatgataccatatccaccagtttgtgacatgaattcattattgtaaccaatcaaaccacgtgatggaactaaaaattcaagacgagtttgaccattaccagttgattccatattcttcatctcaccttttctttgtgaaagtgagtcaataacagaaccaacatattcatctggagtatcgatttgtactgattcaaatggttcgcacatagtaccatcaatttcacggtaaataaccttaggacgtgaaagttgtaattcgaagccttcacgacgaagttcttcaaccaaaattgaaaggtgaagttcaccacgacctgaaacagtccaagcgttcaattgatcagttggttcaaccttcaaagaaacatcggtacgagtttgacgaatcaaacgatcttcaagcttcttaggagttacttgatcaccttcacgacctgcaaatggtgaatcgttggcaacaaagtccatttgaagagttggtggatcaatcttaagaagtggcaatgcttctggatgttcagctgatgcaatagtttcacccacgtagatatcattaataccactaatggcaataatatctccagccttagcttccttaatttcgttacgtttcaagccaaagtaaccaaataacttagtaacacggaagttttgagttgaaccatcacgcttcataacagtgatgttgtcactaactttaaccttaccacggtaaattctaccaacaccgatacgaccaacatagtcatcccaatcaagcatggtgatttggaattgtaatggctcatcagagttgtctactggagcaggaatattcttaataatggtatcaaagattggatccatagtttccttttgagtacttggatctggatcatatgatgaagtaccattcaaagctgatgcataaacaactgggaagtcaagctgttcatcgttggcacctaattcgatgaaaagttcaagtacatcatccaaaaccttcttaggacgagcgcctggacggtcaatcttgtttaaaacaacgataggttttacgccagcttccaaagctttctttaaaacgaaacgagtctgtggcattggaccttcataggcatcaaccaaaagcaatgcaccgtcaaccatgtgcataacacgttctacttccccaccaaagtcagcgtgacctggtgtatccaagatgttgatagtagtatccttatacttaacagcagtgttcttagacaaaatagtaataccgcgttcacgttcaatggcatttgagtccatagcacgatcttccagattcatgtgttctggcaaagtatcagattgcttcaataattggttaaccaaggtagtcttaccgtggtcaacgtgggcaatgatcgcaatgtttcttagatcgtctcttcttttttctgacaaaagtattcctccccactcttcaataaaaaaactgtgactctgtcacagtttcggtaacgcattagcgccttatcgaagtgcttttcttaaatctgtatagttacgttagtgaattttaccacctaactgcatacgggtcaacgcttaacaatcaagttaaccctggatttttttatgcaaaaacaagcaaaaactattaaactatggtaaaaatataatgtagataataatttttaaaaaggagtaattattttgatcttaatgaaagatatcgtacgtgacggtgatcccgtcttacgtcaagttgccaagcctttaacatttccacttagtgatcactataaaaaattagctgatgatatgatgcaatacttaattgattcacaagatcctaagattgctgaaaagcaccaattaagagcaggcgttggcctagccgcacctcaagtaggtgaaggtgtacaaatggctgcacttttagttcctgatgatcaaggcaaaattatctttaaagaagtttatgttaacccagagattgtctctgaatctgttcgtcaagcttgtcttagcgaaggtgaaggttgccttagtgttgatgaagttattaatggttacgttccccgccctgataaattaaccattcattactacaccgttgacggtgaagaaaaaaacattcgcttaaaggattacccagcaattgtttcttctcatgaaattgatcacttaaatggtcacttgttctatgaccgcattaataagcaggatccattcgcacttaaagaagatacagtcgtaatttcttaattgttatttaaccaaaacaaaagcctgcagatgcaggcttttttgtataaaaaaagtcactggttaactaggccagtgactcatacattgggaattaagaagattgaagagacttcttataacgagcaaatgaatttattaatcatttactacatgattatcgtacaactgatgttattttacgtcaataacattgaccaaatttaagaaactgtcaaatcttttgtgtaaatagttctttctcgtaaattgattttttaattatttatttaatcaaagtaggattctaaggtgtcctgaacctgaccaaagcctttatgaattcgattgaaataacggtcattgtagctcattgcctgaatgccaataaaagcatcaagcgactgttcagttggaaactctgccttaggcttagctttgcgcttgatcacattgttaaatgattcaatcatgttagtcgaataaattgaagctctgatctgcttgggatagttataaaagaccagcagatctggttctatgtctttcaagcttctgataacatggctgtaaaccttgccccatttggtatagaagtcatgcaggacagctgtggcttcttctttgtttgtctgttgatgcacctgtttgaattcgttcatgatcttttcacgatcgtcgacgcgtactttagcgcagatattgcgcatgacatgaaccaaacagcgttgaaaatgagctttaggataagtcctggccaaggctgttttcatgccaacaacaccatcagaaagaaaaagctcaacttgctttaagcctcgggatttcatgttttgaagcatatctgtccagacttcaatgttctcgctaggtgcaatgcagtagtcaatgacctccttgtgcccattaggcttgatgccaatggcaatatagactgcttcacgctcaaatgtttctcggcgcaaaggaaggtatgtcgcatccaaatagacgcagaaaaacttgtcgcttagcttgcgtttgtggtaagcctcaacctttggaatcatctgcttggaaatatttgatacctgagctggactgtaatggctgccatacatcttttcaattagatcggctatttccctggtggtcacgcccttggagtaaagcttgataatcatgctttccaagatatccgagtgctgcttgtagtcaggcagcgtgtgctgatgaaattgaccgttgcgatcccggggcacttgcacttcaattgggccaaattgcgtatcaactttgcggaaataagcaccatttctagagttgccagtattccagccatttctggcatagggatcatagcccagaaaggcggtcaattcagcttctaacaagttattaacagcctgttgtagctctttgcgcaataaatcatttattttgtctggattgaatagagcttgagcaaaatctttggtaaaatcattcatgaaggagttcttctttctgtatgtgtttttttgttcaaaccaatcatacgagaaaggaactcctttttctaatgtttaaagaaataaatttaaggaatcattcatccttacacaaactattttacagtctcaaatttaatcggtaaaaatcaaaagaaacataattcccggatttaaaattgaagtgcaacactaagtgttaaacaaaaaggccatgaagacctaaacttgaagtgacgaaaaatcaagaaaggaagatcttcatgaccaattcaaattctagcatttctaagcactatcatcaattaaccagcgtacaacgtggacaaattcaagcaatgctggattccggcataacttcccgtactgttatcgctcaagaagttggctgccataagtcgacaatcagtcgcgaaatcaaacgcggaagcgtcctgcaaagagacagcagctatttattgtatgagcactattacgctgatactgcacagatttattatgagaagcgtcgcaaaaactgctatcagcgcaatccattgaagcattatgctgtctttttgagaatgctctccagacgctttaaagctaaatttgatgccaccagcatcgatgagttcgttggtgaattccaaaggactatgccaggctacccttgtcccagcacaccaaccgtctatcgctatattgatcagggcttgctggacataagcaatattgatctgcctatgaagctcaaaagacgcaggaacaagcgtcatcacagccatggcggtcacgctttgcacaagaagcatcttggcaattccattgaacagcgtcctaaggaggttgaagacagaaaagctccgctgcactgggaaggagatctggttaaaggcgtcagacgcaagaatcagcctgctttaatgactttgactgaaagaaccacacgctttgaagtagttatcaagattcctgactatcgggcaagcacatgccaaaggctgcttcaaaaggagattgacagacatcctgcctggtttaaatcaatcacgtttgacaatggctctgagtttgcggatatgaccaagatcaagggctgccagatttactttgctcacccatattctccatgggaaaggggcaccaatgagaactgcaatggtcttttgcgtcaattcttccctaagggcaagagcatgaaagacaagtcaaaagcttatgttcaacaggcaactgatgccattaaccacaaatatcgccgaatcctccaatatcacacagcagaggaactcttcaagcaatatatctcttcataacctaactgttgcacttaatttgacaattcaggaagaaacataattatatacttaactttataattatgataaaatttttatagctattgagtaatttttactctacattgaacgtttatacattaataaggagaatcatttatgatttacaaagttttgtatcaaaaagacaagattgtcaatcctcgtagagaaactacacaaactctttatatggaagcagacaacatggtcgaagcaagaagtatggttgaggacagtaccccctataacattgaactcatccaagaattaactggtaattcgttaacttacgaaaaagaacatgctgactttaagttaacaacgttcgacaagaagtaataaagagtgcgaattaaaaataatgaagtagccgtttatgcaatcgggggtttgcatgaaatcggcaaaaatatgtattgtgttcagtatcaggatgaaattatcatcatggactgtggtattaaattccccgaagataacctattaggtattaattacgttatttcagactattcttacctaatcaagaatcgtaagaaaatcaaagctcttgtggttagtcacggacatgaagaccatatcggtggtattccatttttgttagaaaaaattcctgaaattcctgtctatgcgacaccatttgccctttcattaattagaggcaaattggaagaacacggaattttaaagacaactgaactacacgaagagcatgaggatactgttttgaagtttaagaaactttccgtttctttctttagaactactcactctattcctgatactttaggtattgccgttcatacaccactcggtgccgttgtctttactggtgactttaagtttgacttaacaccagtaatggatcaacctgcaccagattttcaaaagatggctcaattaggcaatgaaggtgtacttgctcttctctcagattcaactaatgctgaagtaacacaatttactaagtctgaacgatttgtagctaagtcactacataatatcatcactggaatccacggtagaattatttttgccacttttgcatctaatctttatcgtgtatcaactgctattcaagctgcaattgataccggtagaaaggttgcaatttttggacgtagtatggaaaatggcgttgataatggggtcgacttgggctacttaaatttgcctaaggatctaattgttgacgtagatgagatcaacaaactaccacctgaaaaagtaatgattttatgtactggttctcaaggtgaaccattagccgctttatcgcgaattgctaatggtactcaccgtcaaatcagcttacaacctggtgatacagtcatcttctcctctaacccaattccaggtaacacattaagtgttaaccacttaattaataagttaatggaaggcggagccgatgttattcacggaagagtaaataacgttcatacttccggacacggcggccaagaagagttaaagatgatggttcgcttagttaagcctaagtacatgattcctgttcatggtgagtacagaatgcaggttattcacacccagcttgctcaacaagccggtgtacccgctgaaaacacttttgttttatctaatggtgaagttgtctgctttggccctgatggcgctagaatcacaggacatattcctgcaggtgacgtttacgttgatacttctggtactgcagatgttggcaacgttgttgttcatgatcgtcaaattctttctgaagaaggtttagttgttgcagttgctacagttgattataagcacaagcgagtcttagctggtcctgatattctcagtcgcggatttgtctacatgcgtgaatcaactgagttaattagtcaagcgcaaaagcatgtttatcatgtgcttagaaatgaaatggctaaatcaaatagaccaaaagaaagtgacattaaaaaggcgatcaccgaaaatctttcagacttcttgtattccaagactgaacgacggcctatgattttaccaatcattatcgaaaagaaatagtaaaaaagactccttagggagtcttttattttagaaaatgaataatatgcataaaaaaattaaagttcagttattagttaatgaggtcgctgggaatggcaatgctattaaagctgataaagaattacaagatatactaaaagaaatgaatattccttttaagcgacaaaaaagtcattatcctggagaattagtcgttctagcacaaaattacgctaatttacatctctcttctgaacatgttttaatcgtagttggtggagatggctcctttaatgaagttttaaatggaataaagacttctaattatcctgagacagctattacttatttgcctgcaggaacaggcaacgattttgcccgtggtgctggattaaccgcagatcccaggcaattaatcaacaatttgctccgagatcctgaaccggaacaagttgattgtggttttttcacatcaaatattaaacaaattcctaagggttactttgttaataatttcggtattggttttgatgcctttgttgttcatcagagtaatcatgagcaattaaaaaaacacctcaatcacctcaattctggaaatatgatttatggcctaaatataatcaaggcactaattaagcaggatacctttacagtgactgttaaaactaaaaacgaaactcttcgttacggagatgcatactttgtcactactactaaccatccctactttggcggtggttttgctattttgccaaaagcggacatttacagtcaccatcttgatacagtaattgttgaaaaaccgagtttacgcaagtttctctggctttttggtaagctgatcaaagatggttcacacgttaatgcaccagaatttcattatattgaagctaaagaaatcctagttcaaaccaataaaagtgaatatgctcaaattgatggtgaagatattgaaaagcagcccttcaaagtaacatttaaagttgatcattttaatttattaaaataaggaagaattccaaattcttccttttttatatcttatctaaaatatctcttttcgaattatgattttgataatattggtcctgatcaacgaaatcatgtacttgatcataaaatttcttccaataacggtatttttgatactgcttttgccactcccgtgcttcctgcaagtaattaccaagaagtccattaatctgatcgatatgtttaatcacctgattagcatgatacaattgctcttccacctgcttttgagttaacgttgactcctgatcttcaaaaaatagaacattttcttgataatttttttcttcttgcaattgtttactattgtccatttcttctttgatagctgcaatttcgtctggctgtaatccaattccagttttagctttgactaataacgactgaatatctgccaattgcacaacatctatttccattttttgataacggttcgaatcagtcaatgtgaactcatcatctgttctacttacaaatacaaccacgtttctgattaattgatctatatttggcaagcgtctcaataaattaataatcactgggttgttgcttttttctaggacatatttaatactttctttatgcttggccacttgatcggctatctgatcataatcagcctgcacattatactgtccatttttacttgttcgtgctttggtttccaagcaaaaaatcccgctagtcgtaattatcacatgatcaatttggttactccctaaactattctttttttcatagggatatggtaacagtaaattatgaattatttctttccctgtctgcacttcacgtaaacgagaattcactaattcttctgcggcagcgcctgccaagagattgctaagatggcgcaaatcacgttgagataaaatattcataggtcgcaaatgttttatttgattcaaatgtagttcagtcattcttttctgaaatgcgtttactttttgattgtaaaccttatagccagaattaattgcccgaattcgtaaaacattttgcagagccaaagctcgtttcaaatcacgtttattattcaacaaagttttttcaactatcatagcatcatgaacagtttgtgaatcagttacttttttatgtgtaatccaagctttttgataactagcatgattttctaactcattcacatactgatttaagtcattttccaaaggcaaaattttgtttctaccttctttgactattgagccataatagcgcaaattttttgtaatttcgtctaactcattgaattcatgtttgccataatggtaagttaccttagtttctccattccaactagtcttacgccaataatgaccatccgtctcaccaaattcaactaattccgccactgaacgatctaaatagtacttaatcaaataatgacaatggcctttattgtcaaaaatgcgtcgcttaatataacccggtcgcattaattcaatgatctgaaaggtcaagttcttatgattaggaaaacggtatggtaatcttttgcctgcaattttttcaattttagttatttctttcttatctgttacagataattctatttttttcattttcttcttttttcgcttttgaaaaaaataataggttaataagcctattgttagtgtaattattgtaatatccatgttaattatccatattttggaacgtatgtttagacaacaataattataccatgattttgtataatgaaaaagccccttgttttaacaattcaaggggcttttatccttataatttgatattttccattccaatcattggatcaatttcaccagaatatattttttccgaggttagaacaaaatcttctgctacttctgctttatcggtttcattctccatttcttgagctttttcgtgctgcttgctttgatcagatttatccaatgattttgtaatacccaattgctgacaaatcttcgctgctaagccagtcttacgatcatttcccggcgtcttaaaagctgccacaaatgcccgtggatcaccaactaacactaagtttttctcagctcgcgttattgcagtatacaaaaggtttcgttttagcatcacaaaattctgcatggttagattcaagatcaccaatggaaattctgaaccttgtgatttatgaatagtgattgcataagcccgggtcagatcatttaaatcttttctagaaaaggcaacttctcttccatcaaaatctgcaatcatgcattccttggcatcatcttcatcaatgctaatgatcttaccaatttgtccattataaatatctttttcaggattattttgcaattgcagaatacgatcgccaattcggaaaacttcattatgtgcttctaataccttacttttaggctgagatgggtttaaaattgcctgaataacattattaagattagttacaccaccattgccaagatacatcgcgctaagcacttgaatatcatcttttgcaaatccacgttttaaagcaagtttaacaatttgtccaactgcatcccctactaattcgggacgacagctaataaaagaataattatttgttttcttaaacaatgcttgctgatctttaccctcattaacatcatgcgccaaagtaataatcgttgaatcatcaccctgtctatgaatctgcttcaaaatagtagttggaaacgcttgcgatttaatcaggtcactgaagacattgccagctccaaccgaaggtaactgatccttatcaccaacgaaaacaatatgccgcgtatcatgaatacttgccaaaagttgtttaaaaaggaacatgtcaaccatcgacatttcatcaacaattaagatttcaccatttaactcattcaagtcctgagtgttagtatcaccaatacctaaccccaacattcggtgaattgttttagcactgattccggtaatttcacccattcttttagctgcacgtccagtcggtgctgctagtaaaaacggaggatcttcactgtaaagagcggaggaaggaatctcagccagcttgcgtaatactaataaaattccattaatgatagtagttttacctgtacctggtccacctgtcaaaatagaaatcggttggttaactgcgtttttgatggccaacttctgtgtatcgtcgtagtgaatcttaagttccttttcagcatccttgattgcttgctctacctttttatcatcatattgttctctttttttatcttcttttttttctaccaagtttttcatcaagcgagcaatatcaacttctgtttgataaatattttgtagagcagcattctcaccatcaactattactttgccagcttcttgtaaactattaatacagctagcaattgggtcgaattgattgatttgaagcaatttacttgcttctgttaataactcagctaagcctacataagtatctccctcaccatttaaagcatcgagtaatacttgataaacagcacctttaattctacgtggatcatcactagcaatatctaattggcttcccatcatatccgcggttttaaatgcaaaacccgaaatatcattaactgctgcataaggatctttctctagttttgctaatgcttcaccatgataaagctggtaaacccgtcctgcaatacgcttattaatgccgtatttagccaattttaaaattacttctgaataagaatccatcgcatttagtcctgccaaaagactatccttttgctttctagttaaagaaagcttatcaatcttagctggactttccttcaatacatctaaggcatttagccctaattcatcaataatcgtagtcgcagcctttttaccaattccagggaacttattcgaactcaaatacttagttaaagatccctcttcatgtggcaatacttgcttatagttatttgctctaaactgcaagccaaatttttcatgcattactagtttaccctcgaagcgatagctactattaatttgaatatcgccaaaattccctgtcaccttaatatcgggacgagaataatcggataaagtgccgataatttcaacgtcaagaattttatacaagtctttactattttcaaaaacaatcccgttaaccttaccggtaaattcattcataatttttcttttccttgtcatttagcatcttcataattgaagcatactgattcattgcttgttgataatacttagcatccatctgcttagcttgagcaaaatatttttgagcctggtcacgatctttttctaatgtagtgacacctagtaaaaaataaactttcgcatttttcttattatcaggaattgccaaatacatttgctgagcctgttgattctcacccaaacttaaccaaatatcgcctagcaattcctgaattcgctcatcaatttttttgatcgtcaaagcataagctaaagctttttggccttgccctaattttaagtaagttagtgccttttgataaagagttaagtcatcattaggtatctgatctaataaagccagtgctttatcaaaatcgccttgcatgtaataacacactgccagattataatttaattcttgtggctctttaaccagatgctgggcctgctccaatagcttctgtgcttgatccaagcttccttgctcaattaaatacgtcgatagctgcaaataattagcaacttgttgtggatgctgatcgatttttttgattaaaagatgaatggcttgttctactttaccttcatcataaagttgcgctattttttgatccattataacgagtccgtcttcgataatttacgtcctaaataactagtttcattccacactaccggtttaaaagtctttccgccatctagtgtttctaagacagttaaagaggtattgctaaggccgccatttttgcgaatatctttcaatggatagcctaaaagtccacccataatagctgataatgccgcaccatgactaactgctagaatcttatcatcatcgtcaggaaatctttgtgccatttcttgagcaaatgcttttccacgagcaataacatgtggataatcctcaccatgaagttcagtcggatcatatttatctggatggtgccaaaaattatccatttgtttagggaattttttctctgcatccccaaacttcattccctccatatcgcccaaattaaactctctgagtcgttcatcgatcacaacaggtaagttagcgttcattgcatcatcgatgccctgagcggtattaaaggcccgatcaagcggactggcaaaaattcctctaaatttagttccttgcaagtgatgacctaatttttttatatcttctaagctttgtggcaaaagtggtgaatctccatgtcctccttggaagcgactagctaaattccactcagttttgccatgacgaacaaaataaatttgcattgcttaaatccccctaattgtctaatcaataagaatagtttagcacaaagaaaaaggcgttcgaaaaatcgaacgctctttttgcatattttttaaactaattgtaattgcttttcttcttggtaagcagcatcaatattaccgccacctaaacattcttcacccttgtataaaacaagtgcttgacctggtgtaactgcacgagctggctcatcaaagtaaacatcagcagtattgtctgcggcatgatacttaacagtcacgccgatatcacattgacgataacggaactttgcagtacagtgcatctcaaaatcatgatctggcttaccagtaaagaatgacatatcacttgcattcaagcgactagcatatagaagtggactatcatagccctgctctacaattaattcattcttcttaagatccttgccgaccacgaaccatggatcagttgattccttagttgagcccaagcccaagccctgtctttgaccaatggtgtagtacattaaaccagcatgctcaccaactaccttaccatcaggagtgaccatcttacctgatttagctggtaagaattcacttaaaaactttctaaagtttctctcaccaataaagcagatacctgtagaatcttttttcttcgcggtagctaaaccattagccaaagcaatctctctaacttgtggcttagttaggttagctagagggaaaataaccttactaatctgctcttgactcaattggctcaaaaagtacgtctggtccttgttaccatccttaggacgcatcatatgagtaacaccattggtatccttaacagtcttagcatagtgccccattgcaatgtagtcagcatccaagtccatcgcaaactccaagaacgacttgaacttaatctgactattgcacattacatcaggattaggggttcttcccttcttgtattcatccaagaaatattcaaaaacgcggtgccaatactctttttcaaaattaattgaataatatggaataccaatcttatcggcaaccttttttacatcttcatagtcttcagtagctgtacagacgcctgaatcatcggtatcatcccaattcttcataaagacaccaacaacatcgtagccttgttgtttaagtaaaagtgctgaaacagacgagtcaacgccaccactcatacctacaactactctagtcttgctattgtcaaccattattcaatcaatcctttacttcaagcaaaatcttacgctcctcaagatcctttaaaatataatctaaaagttctacagtaggagctaattgcttatttttaaaaatattaaccttctgcaaaccgttgcgatcagtaataaccatagttaaatgcgacaagtccttattaatggtcatctttaacttagtaggcgcgttataaggtgaatcattgtaaagaggatgttcataattaaaattacccttagctgtcttcacaaagccagcatcaatcaaagcataaagcttcaactcaagattcaaagtaaacttacgtttatcaccattaatcacaactgtatttgccataattttcctcacttatttataataagatactttctttttgaaagcaactatttatttttagattgaattctttgtacaatttttactaattcttgagcgaattgctcaatttcttcatccgtattataacgcccaaatgaaattcggatcgactcatttattcttggtgaattttctccaaaacaagcaattaaaacatgtgatggctccaaagaaccagcagtacatgctgaaccgcctgacacggcaaatccattcaaatcaagatttgtttgtaaagaagtagtagatacaccattgagatgcagattaagcacatgatgtgagtaacccggaccatacccaccattaatttcataattaatttgatgatcgtctaattcctttaaaataatgtcttgataatgagcatatttcttttgcaaagcatcacgaccaatctcggatacttcacggacagcttcgccaaagccggcaattcctggtacgttctctgttccagctcgacgtttggtttcctgctcaccgcctaaaatcaaatttggaatatcgatatccgcattttcatataaaaagcctaaaaacttaggtccattaattttatgtgcagaaacagacagaaaatcaatgttcatgtccttaacatcaattttaattgtgcccattccctgaacattgtcaacatgaaaatatgcattggagtcctttaccattgccccgatttctttgagcggcataatggtaccaacttcattgttaacggccataatcgatactaaaatagtgtctggcgttaattccttttttaactgttctaaagaaatttgcccgttttcatcgacattcaaatagacaatgttgtagccctcattttccaaacgtttcattggattaagaaccgagggatgttcgatcggcgtagtaataatctttttaccaatatttttacgagcataggcagttccaagaatcgctgtattattgctttctgaaccacctgaagtaaaaataatctctccatcttgagcattaatatcttgagcaatctggtgacgagctcgatcaattacatttctggccctacgacctaattcataggtactagaggcattaccaaaatcatttttcatttcatcggtaataatatcaattaccttgggtgacattggtgtcgttgccgcattatctaaataaatttcacgcacgtttaattcatcttttctacataatcactaattaacttagctgccttagcgccgacttccttgacaaacttgtcaaaatcattgtctgcattagcatccccattatcggaaattgcacgcatagcaaccaacggagttttaaaatgacgagcaacttgtgcaaaagcggctccttccatttctactcctaaagcttctggaaagtttttcttgattaactctttttgttcttctgattgaacaaaagtatctccagtaacaacaagcccttccttaaaatctacgtcttcttcacctaaatatttcttaaatgcttccctttcaggcgaattcaacttaaaggtagcaggctctcttggaatctgaccttctacatattcaccggcactaacacagtgagcatcgtgataggcaaaatcatttactaaaatcacatctttacgatgaacatcatcttgtaatgatccagcagaaccagtcataaaaattacatcaattttttctttagttagtaaactagtcagattcatagcggcattcactttaccgataccacttaaacctaaatatacatcattgccattaacagaaaaatgttcgaattctgttgatccgaacatttcttttgtttctgcatggaaatgatcacgataaaattcagcttcttccgccattgggacgataatcgcaatcttcaatttatttcctcatttccactataaatgaaatagtgctaatagcaccaatataattaaaacaatcactatcaggatagcacgattcaatctttttttcagtcttaaagacttctcttggcgaatcgtttccttatcactcgattgattatgctgataaaattcttgtccatccccagccagagggcgtcttctaggttcttcttcagagtcatcccgcttaaagtcaggatttacatctacttcttctgaatcattatcagaaaaggaagattttagcttattaagtaggctttttttctgccttttacgataatcagagcgtttttctaccataactaatccttattatcggtctgagcattacgcaacatcatattctcccaaacagtaattgcataaattgtctttgcatcaacaatttttccttcagccaataaagtttttaattcatctaagctataccaactagaagttaaaaattcatctgcatccagtgcccgcttatcagtcaatttagttaaggtatcacaatagaaaagatacatcttttcatcacaaaaaccaggaaaagaatagaattcactgaccttttcccagtaatctgtgcgatagccaccttcttcattcagctcacgcttcattgcatcaagcggacttgcatcagtggaatcaaccaaaccagctggaatttccaaagtaatctgcttaattggttcccgccattgctttactaacaacatcttttgttcatcattaattgcaataacagccgatgcaggcttatgcttaataacttctctagttgcaatttcaccattaggaagcttaattgtacgaacagccagatccaaaatacgtccttgaaaaatctgctgtgacgagatttctgtttcctttaaatccaaaatcccagctcctttttaggctaaataaacatttacacattgcagaccatttttaccttgagctaactgatatttaactctttgacctacttgcaaagttttatagccttcctctttaattgctttatagaagacaaaatatgacttatgattacgatcatcttcaataaagccatagctactgccttcatcaaattgttttacagtacctaaccgcattagttttcaaatccttcttgaacagcttctgggtaatctgcttcaacgattttagcacaacgaccacaaagcattggcaactttggatctacgccaatatcagttctaatcatccgacaacgaggacatacttcgccttcagcatgttcaactactacactagcattattcaattgctttgcattatcaggtgcttcaccatcagcaatagttaacttagatacaattagaatttgtctgaaatcagcatccaagtcttggagcattgccttagtttccttatctgggtaaatagttactgttgcttcaaacgatttaccaattaacttcttatttcttgcatcttctagagccttcaagacgtcatcacgcaacttcatgaatttaccccaattttcaagcaaatcatcatggttagcatattcttcaacttctggcatattagcaagttgaacgtaatcttcaggttctttcaagaagccccagatttcttccatagtgtgtggcaaaattggtgttaagatcttagccaatttaacagcagcgtcgtaaataacagtttgcattgagcgacgatcatggctgttttcaccatcaatgtaaagtacatccttagcaaaatcaagataaaatgcagaaagatcattagaaacaaagttgaagaccttcttgaagacagtagtaaaatcaaacttgtcgtaagcagcaagacagtctttaactaagtcatttaatttcacttccatgtattgatcaactgaacgaagatcagcataagcaacgcgattttcttttggatcaaaatcactagtgttggccaacatgtaacggaaggtatttctgatcttacggtaactttctgcagactgctgcaaaattcccattgagactgcaacatcagaagtagtatcagcttgagctacccaaagacgaataatttcagcacccatcttcttaattacatcgtttggtgaaattacattgccaagtgacttagacatcttgtgtcccttatcatcaagcacaaagccttgtgataatacttctttataaggtgccttaccagttactgcaacagacgtaatcaaactcgaattgaaccaaccacggtattggtcactaccttcaagataaagatcagctggatagtgtaaaccatcacgtttttccattacgcctgaccaagatgaaccagagtcgaaccaaacatcaagaatatctttttctttagtaaactcgccatttggtgaatgttctgaagtaaagccttctggcaacagttccttagctgtatgagtgtaccaagcatttgaaccttctttttcaaagatcttggcaatatggtcaatcgtttctggagtaacaattggggtaccgtcttctgcatagaagatcggcaatggtacaccccaagcacgctgacgagaaattacccagtcgccacgatctttaatcatgttgtaaagacgagtcttcccccatgaaggaataaagttagcttgttcaatttgatccagaatttgatctctaaacttagaaattgaagcaaaccattgagtagttgctctgaagacaacgggcttcttagtacgccaatcatgtgggtatgagtgagtaaagaagcttaacttgagcaaagcgccagcctttttaagcttatctgctaccaccttgttagcatcatcatagaacattcctacaagatctggatctggaatatctttagtaaagcgaccttgtgcgtccattggactgaagaccgggataccatacttttgaccaacacggtagtcatcttcaccaaaaccagtagcgttgtgaactaagccggtaccgtcatcatcagtaacataggtgtcattcattaccaaaccatattggcctacaccagtcttaccataaaggggatgcttataagtcatcccatcaaaatcagtaccttttaattgtttaagtactttgtagtccttccagcctaagtcttctgcaatggctggcaaacgatctgaaccaattacatacttcttaccgtcaacttctactaaggagtagtcaaatcttggattaacggtaatacccacgttacttggaatagtccaaggagtagtagtccaaattactaatgaaacatctgaatctaagatacctttaccatctttaattggaaaagcaacataaattctaggtgatttaatatcatggtattctacttcagcttcagctaaagtggattcacttgaccatgaccagtaaactggcttcaagcccttataaatataaccttttttatacatttctccaaagacgcgaatttcttgtgcttcaaagtcatgttgcaaggtaatatatggattatcccaatctgccataacgcctagacgcttaaagtcggccatttgcttttgaacttgttcttcagcatattgtcgacaaagctcgcgatacttagcacgatccattgtcttacggtcaacgccttgcttagctaattgttgttcaactggaagaccatgagtatcccaacctggtacatatggtgcataataaccgttcatattcttgtagcgaacaatgatgtctttagaaatcttgttcaacgcatgtcccatatgaatattaccattagcaaatggagggccatcatgtaaatcaaaacgaggcttaccttcgtttaactttaatctttgttcatataacttgttatcttcccattctttttgccattcagcttcacgaacaggtagattaccgcgcatcttaaatttagttttacctaaattaagggtatctttgattctcattaacaaaattcctttctaaaaaagaaagcctcatcctaaaattaggacgaggctaaccgtggtaccacctaaattgaacttattataagttccacttaactttgcgtaacgtgcaaataccgtttagattaattaggcagctgatcagctcttaggctcttatgctagtcttccaccatcactagctcgctgaattgccttcaagctttactgtcaatctaatatgcttattttttatagtcgtcaggaaaaacaattgttgggcctaaaggatctgatttcatttcaggcttaacattaattgtttcatgacttggactgtccccggtcattggtttaggtgcagcattttcttcattatctgcatcgtcagaatcatccggttgatccaactccaaatcatcagggccttgagaagagtttacgtcattttcatcatcattgtcaacatcttcatcttcaacgtcttcatcatcagcacttactggctccgaaccatcatctggataataacgctctaagttgaagtaatcatccaatgcatgttgccacttttcatcattcaaattatcgatttcagtctgtagcatttcttgaatattactacgaaattcactaacttgctcttttacacgcatataatccgtagaaatagtatcttgttgatgcttttggaagttaatattatcttccgcttgctttttggcatccgcaataatctgcttagcctctgcttctgctttctctctaatttcatcagcagtttgttgtgccgaaattaatgatttatttaaagaacgctttttttcgttatattcattaacttgatcttgataatcatctactttttcttgtaaatcagttaactttttatttaaagaaactacttcattcttcaagtcaaccacttgatcaagtgtatcaccataatcatcaacaatctgatctaagaagctatctacttcaagacgatcatatccattacgaccacgccgtttaaattccttgttgtgaatatccatcggggtcaattgtgtttctttgtctgccaaagtctgagcaccaccttatatttaccttttcttgtagtcgaaacatcctcaatcaaaatccgaccaaagtgtcttaaactcaagacatcgtcttctttaatcattatattagaatctgctatttcatgccaatttaatttaaccagctgactattaatcatcttttgaatttgaccgcggctttgtctgctaatacccgataatacagcatcaattcgcattgaggcaactattttcgttttttcaatcgaatcatcctcaggaaccaaaacttctttgaagctaatcggtctcagctttacttttgctctgccaatgcggtcaatttgctcttcaaaaaattccgtcatttcttttttagtgaaaaactgccattttccttgattatcattaataatatcgccaaaaatacttgtatcaatacccgaattcgccaaggtgcctaaaataacactataatttattttagtaaatttttgcggatattcaatttcatacggctgaatctgataatcactcggtcgcagattaagccattcttcacttaaataaactcgctttttctctgcattaggatagccaccatactcttgaacaaatgcatcattaccaacaattgttcttaaaattgctcgttttcccggatccaaaaaatcagtcaaaattggctcatgcttaaaaatcagctgattaaaaagaccagtaaaatagtcaattactggtctttcctcttgattaaaatgtgggtaaaacttacttgcctgtctgcgttccattacaccatcatcctcaataaaatatcaaatatccatcttaaaacatagttttgaatgaaatataagataaataaagcaataattggcgagacatcaattccagttgaataagctaatctcgcaaatggaccttttcgaaacaaatttaaatatggatttacaaccttgtctaaaaagcgaccaacaacagaattacttagcattggtagccaactcataattgcatcaatcacgatcagcagactataaagccataaaatccacgtcagtgccaagtagattaaatttaatatattaaccattagcttaaattgtctttcttatccactaaatcactaattttgccatcagtaacaaactttggtggagttgctaaaaagattttatcaccaatacgttggatttcaccatttaatgcatatacagtacccgtgatgaaatcaacaatccgacgtgctgaactgtcttccattctgctaaaattaatcactactgctttattatttaataaattttgtgcaacatccttagcatcggaatatacccgtggttcatataaaacaatcttgcttttagccgaattcaagcctgatttaattgaaaccacattatcgcgattaactgagttcagaggcaagtcttcattttcatttttagtctgtgaggcatattcttcgtcattttctaattcatcatcattagaaattccgaaaaatcttcctaatttatcaaaagccatttatactacctccaaaactagttttcactacgatgtttaaaaaatggaatatcactgttatcatcactatcgtcctgagcgctagtttcaatttgagaaatactatcctggtcttcatcactaaaagtatcaaaaccctcataatctttcttaggctcagtaggttgggtatttcttctttgattgtcttcgctatcatttagtccccaaacactggttggatcaaccatcgtttgcttaggctgctcaggttcttgtttttcggcagcaggctgaactgtttgtggtcgatcaactggttgcttaggttcttcagccttaggagcttcttctttttctttaactggttgagccttaatttgttggctacgacctggtaattgcttagaagcagcttcttcagccttagaatcaattccagtagcgattacagttactaccacctcatcgcccaagttaggattaattgaagtaccgaaaataatgtttacatcgtcaccagcagccttagaaacaatctctgaagcatcttgagcctcaaataatgtaaggtcaggtccaccagtaatgttaagtaacacttgcttagcaccatcaatagaaacttctaataatggtgaagaaatcgccagcttagtagcttcaactgttctattttcaccgctagcacggccaattcccattaaagctgcaccttgattttccattacagtcttcacatcagcaaagtccaagtttacgtagtcagttgaagtaatcaaatcagaaataccttgaacaccttgcttcaagacattatcagcttccttgaaggcatccatcataggagtcttcttgtcaaccatttcaagcaaacgattgttagctataataaccaaagtatcaacatattgctttagctgagtaataccttctgcagcgtttttagagcgcttagggccttcaaaactgaatggacgtgtaactacgcctacagttaatgcgcccgtctcacgcgcaatttttgccactacaggagccgcaccagtaccggtaccgccacccataccagcagtaataaagatcatatctgcacccttaagtgcatcttcaatcgtttgttcactctcttctgcagctttttgtcctacttcaggatgtgaaccagcacccaacccacgggtcaacttaggccctagttgaatcttgttttcagctttgttgctgttcaaagcctgaacatcagtgtttgctgcaataaaagaaacaccttgtacgccatcgtcaatcattcggttaacagcattgccgccggcaccaccaacaccaattactttgatgacagcattcttattgtcgtctgaatcgaatgtaaaatccattaaattaaccacctttaatcaaagaatttcttaaagaaactcttcaagctattagttttttcttgcttagtattattttcatcgtctggcacagattctgttctggcagacattttgcttctattataagcttctttagcttcactttcactattagaagtcgtacttttagaaatcttggtactttttggctgagaaacggggtcttccacagcgggttcaccaaaaccatagattacgccattaacaagatagtcaacttcagacatcttatatgaatagtggacgataccataagcagctgtataaatcggattacgcataccaatttgatctggttcataaattcgggccttaacatttaacccattagcagtcagactatcaattccttgtaataggctactaccacctgtaatcacaataccacctggttgcttcaatgcattatgcttaactaaaccttttcctaaacgagtcaaaatttgttctaagcgtgcattaataatttcactaagatatacttcgtcaaccatttgctgactatttgcaccaacactattaatagcaaatttatcgttttttgaggcaaattgtggatccgcaaatccatagtccaacttaatttgttcagcatcctttttcgaaatacttaaaacagcagagatatcattagtaatatcgcttccgccttctaaatcgatgttggcatacttaatttggccatctttaataacagttgccgtacttacgccaccaccaagatcgataattaccgaactaaaagttttttcactttcattcaatgctacacttgaaattgctaaaggcgttggcacaaagaaattattatgataaccggctctttcaatagccttcttgatattgtgcaaaggactagtaggtgcagttaataaaattccactaacacccaaggaacgtgcaatcatttttcttggatcatcaacttcagttttaccatcaatcaaaaagcgactcggcaaaaatgtaattgcttcacgatcatccttagctgctgaatgaatcgcagatctaatcgttctttttacatcatcattatttacttcttgcccttgttcaccaacattagcaaaaccagttgcagtttccagttgtaacatccctaccggaattcctgtaactacactataaatcttggcgtttgttttttctgctacaccttttaatgcacgactaattgcactagcagtttgatcaatatctactatttgaccgtgtcgcattcctgaatttggcgttgtaactgcaccgataaccttaccagaatctgcaacaacggcttttacacttgtggttcctatatctaaacccactaaaagatttgaattctccaaaattaagctcccattaatatttgccttgaaaaaattctaacataaataaacttgcaaaacagctacgatatgccataagctttcttttcactagaagttaatggtctactaaatgcacctatttctaaatcaataaggctatgtttaccagctttaattctaatagtatcataatattttagtttgctattcaaagtagcagtattgccaatcactacattaccgtccttcattactaaaataatttgtgaatttcgtctggtattcccacttaataattttacctgatttttaaatgaattaggtaaactgttaaataactttaaatcattttttaactcatctgatttattatagccaacaaaaataggtttatcttggttcacttttgtccaaggtagagctctcgtacctatttttccattatccaaaatctttcggtaagaataaccatcttttaagtaacccacggttttacgttcattaatttgtaaaatcaattgattaatatgacctaaatgaacttgtgcactttgaatttctggatatttttgggataatctttgactcaaatctttttgttgaaacaagtaatcaaaaactttatcgctagccttgatcttggataccttaacaatttctttagcaggtaaatgctctgcaccaattattttaacagtactgatattcgctaaaggtgaaatatagtatcctaaaccagctatcgccaaaactgaaaccgtcattatcagacctagcctacgtcgtaatgatcgtcgtctttctgcctgtaaatttgagagtgaggcagaaatcttggtctgcgattttcgactattcctttgttggttaaattcatgattcaagtacggagacaattctttccttggatcaatcttagttactggctttttggccatctgcctcacctacctcctagcgtgaaatttcttccatcaccttaatcacttgatcagatgcatcaggtacgcctaaagccttagaagctttgctcatttcagtagcatacttttcatcgagcaaaatatggtcaattgaagagacaaaattatttggatttaaatcatcttctggaataaccaatgctgcaccagctttttctaaatcaagcgcattcttcatttgatgattatgagttacattagggcttggaatcaaaataacgggtacacctaatgcagtaaattctgcaatacttgttgcaccagatcttgaaacaacacaagtcatttctggcaatagacctggcatgtttttaatgtatggcaaaactttaatattattaccaatatcaacattcttaattttttcttgtaccttatcaaaataaaaagtacctgttgcccaaataatttgatatggtttttgctttagcgtcattaatgacttaagcataattctgttaattgctaatgctccacgggatccaccaaatactaaaacagttggcatttttggatttaatccccatgttttttcaagatcaattttttcttcgtgcaagcttaaaacttgttgtgaccgtggattacctgtcttaactagtttcttcttttctgagaattcctttgcagcatcatcaaatgtataacaaattttatccacataatgacccaaaaatttattagctaatccaaccactgaattagattcatgaatcattgttggaatatgcattttagctgcttcataaaccatagcaccgctaacgtaaccacctgtacctaaaatgacatctggtttaaagtcccgtaaaatttggcgtgcgcttttagtagcttgtaaaaatagcttgatagtctcaaagttttttaacggatgtttacggttaaagccttgaatcttaattgttttaaagttaacaccggctgctggaacaatttttgattccaatcctttttgtgtacctacaaataagatttcatcgtttttactaataccgcgttctttcaaacgttcaataattgccataattgggtaaatgtgaccgcctgtaccgccacctgtaaaaataactctcattttatttagtctttaattcctcaacaaatctaacaaagtaatcgccacgttcttcaaatgttctaaattgatcccaagaagcacatgctggtgagaacaatagtacatcgcctggttcaactaattcccaagcacgaggaacggcctcttgtagtgtattaacaattacaatgtccttaattcctgcttttctagctgcgtcagctaacaaatatctagtttcaccataaagaacaattgacttaacatgttttttaaataatggtaccaaatcatcaaaagtgaagccacggtctaacccaccagcaatcaatacttccggttgcttaaatgatggaatagctacagttgctgcttcaatattagttgacttagaatcattataaaccttgcagccatcaagtgttgttacatattgcaaacgatgcttagcgccagtaaaggtgctcaatactgcggcgatatcatcattatcagcgcccataattttagaaattgcaatagcgactaaactattttgcaaattatgaatacctggtaatttaatatcagaaatcttcataatcttttcgttttgactttcaagatattcatcgccaatgaaataatcagcattatgatctgtctcagaaaaagtttgcattttagctggtgaaacttctttttccttagccaaaatatctttttgatcataattagcaataaagtaatcattactgttttgcgttctagttacattcaactttgcattgacataattttcaaaagtcttgtgataatctaagtggacgttgttgtaaatatcaacgatcgctgcaactttaggatcaatatcagttacacccaaaagctggaaactagaaatttcaactactaaaatatcatccttagttgccttaggtacaacttcagaaatcggtacgccaatattaccaactgcataagcatgatgaccagatttttgcaaatgatggtccaaaattctttgtgtcagcattaccgtagtagtttttccatttgaaccagtcacacaaacatagggagcatcactacaacttaaggcaacttctggttcagtaataatcgggatattcaactcctcagctttttgaaccatcggattttcatagggaatacctggatttttaactaaataatcaaaatgttctttttcaagcaaatcaactggatgatgaccgccaattacgcgcacgccgcgacttttcaattcttgtgccttagcatttttctccaaatcagctttatcatttaaagttaaatttgctcctaattgcaaaaggagttcgctaacagcaaaaccacttttacccaagcctagaaccaaaatgtttttattattataagttttaatatccttcattttatgattatccccaaattactaaatacaaaatactgccaattaatccaactaaccagaagacaatatctactttccattctgaccaacccaacatttcaaagtggtgatggataggtgtcatcttaaaaatacgcttacccgtagtttggaaagaaattacttgtaaaattacactagcagtttcacaaacaaaaacaatcccaactaacaataatgaccagggacggttaagcataatactgattgttgctaaaccgccacctaaagcaagtgagccagcatcacccatgaaaattttagccggcttatggttaaaaataaagaaggcaattaaaccaccaattacactcatacaaaaggccaaaacagcaaaattcttttgtttgaatgcgatataggcatatgtaccatatgctacaactgataaacctgttgctaaaccatcaagaccatcggacaagttaacagcatttgaaaaaccaaccagccaaaaaataataaatgccacaaataaaactaagctatggacaaccccagcaaaaggaatatataacccaaattgaaaatgatcacttgtagcaatcaagacaattaaaattgcaattataatctgtaatgctaatttttgccatgcacgcaagcctaaattacgtttgaagtaaagcttaataccatcatcaaggaaaccgataataccgtagcctaagagactgattaccaaaatccaaacaactttattcaagctgtgctgcatagcagctacccaaataacagaaataactgctgcaattacaaaaacggtcccacccattgtaggtgtgccagactttttttgatgccatttaggaccttcatcacgaatttcttgtccttcgtgatgtgaccgcataaatttaatcaacaatggaataaagatcactgtcaaaaccagtgaactaactagggcaatacaacttgccaacatcatattcattctgagttactcctttaacttaatgtttaattttcttccagcttttaattctgttcctttagccacgctttgactcgcaacagtgccggtaccttttatgcttaacttaatatctgtcaaactagcaaattggtgtaaatcactataagtccatcccgtcatatcaggacaaatgatttttcctgaagtattgacaaaaatcttagacccagactctaacttttcgccactcttaactccttgattgctaatccgatcaccgctaccaattttaaccaaattaagtcctaattgcttagtttgactttcagcttgtgcaacggttttagcttttaagtttggtacttttacagtagttgatacatcatcatttttagcaatcgaaatgattctctgcatcatcggtttgaaaattgaagccaaaatcttttcagctccgcctccaattaagtgtggttgcttaattgtcaaataaatacagtaacgtggtttacttgctggataaataccaacaacagagaaaatataattactatcaccctttagataacctccacctttagggttagcaatctgcgcagtccccgtcttaacagcaatatcggcgtttcccatcttataagcagaaccagttcctgattgcttattaagtacctttctcatgttagccacaattacttttctggttttagcactatatactggagtaccaacttttttaatctgatagccttgaattgtattgccatcagagtcagtaattttattaaccaactgtggctttaccatttgaccattattagccaaagaactataagcttgcatcatttgcattacattcacagtaacgccttgaccaaaagcagtaattgcttggtcaactggtgttttaaacgaaatcatccccggctgctcacctggaagactgactcccgtcttttcaccaattctgaacttcctcaagtacttcttccaagtcttagcacccatcttttgttctaacttaacaaaaccagtgttacttgaacgttcaaaagcttgagaaaatggaattgtgccccaacctgaagtcagccagtcatggatagtcgaaccagcaatattaacagaaccagaccggtaatactcattagggttgtaattgccactgttgactactgcagcgaatgacaaaatcttgaaaactgatcctggttcataagtatcttggaccaagatatcccgatacgacttagttaatcccttcatagtttgaggattaaaagtagggcgttgagaagttgccaaaattttcccagtcttcatgtcttcaactgtagcagtaattgatgttggtcggtaagttttctgtacttcacttaagcgagtctcaagcaaactctgcaactgagaatctagtgttaaatacaagttgtttccatttttagcaggcttataaacctgattactatttggaagctgatattcagatgcatctaccgaagaaatccggtaaccatctgtcccagtcaaagtcttattgaaataggcttcaattcccatagttccgactaagttttgtgcattagtctttttattccaaattggttgagccaatccaacagtatgtgatgcaaaaacaccattgggatacaatctagatggtgtttccaagaacttaattcctggtaatttcattgcttcaatctttttcttttgccgcaatgtcagtccactaccacctgtcccaaattgtacctgaaagaccttctttttgggggttaaatattggtaaattttttccgcagacaatggtaaaacctgtgccagcttttcagctgtcttggttttattcactacatactcaggtttattcttatagttgatcgaagtcttatctaaaatcgcataaaccgtatacaaatgcgaatcttccgcaattgttaatccatttcgatcatagatagtccctcgcgtggccttaattacctgattgcgcttataaagctgcttggtacgctgtgataaattttgaccattaactgtcttggatattccgatatataaaaatctagccgtaaatacaagaaaaaccaaagccacggccatttggagaaatctccccaccgtaaagcggtagccgtgggctttggatttttgtaattttaaattactgttttttttcattaacgaatcgtcctaatatttttgttaattagagttaatcctttttcacgtgcaattttatttaaacgtgaagtagaggtcaactccccaatctcttgacgtaaatcggtaatcttattctgttccttagcaactgtttgttgagttctagtcaattcatgttgagccgaagttgcagaaatactagaagaaactagaaagatcatcatgcccaacgtaatgacgcttccaataatcatcaaagctttttctatgccactataaggaactttacgcggatcaaggataattcgttgtcgtctttgcgaaccatttctactacttggttcatattcaatttttcttgctgagctatcagccataacattttcctctttataacttctctgcaacccgtagttttgcactgtgtgagcggttgttgttctctaactcagaagtagaggctacaattggtttgtgatttaccaaacgtagcgttggcttcataccgtccggtataaatggcattcctcttggcacctcaacttctgaatacttcttaaaaatccttttaacgatcttgtcttcatgagactgaaacgtaattacactgattcgaccacctggacgcaatatcttaattgcttcctctagcgaagcttgtaaaacatcaagttcgtgattaacagcgacccgcaaagcttgaaaactcttctttgccgggtgccctccagtccttcgtgcatacgcaggaatcgcatctttaatcacatcaactaattcaaaagttgttgcaattggcttttcccgtcgtctttctacgattctgtgagcaatttgacgagaaaacttttcatcgccatattgatacaaaatatctgccagttctttttgacttaaagtattaactaactgataagcatctaagtcctgactttgatccatcctcatatctaatcgcgcatcataacgatatgaaaaaccgcgatctgcttgatcaaattgaggggaagatacacctaggtcatagtaaatgccatctattccatctgagtaacccagttttaccaggtccttttccagattactaaagttgtcatgtaccaattctaaccttggctcactatccagttgtaataaattcgcaaagttcaacttcgccgattttatcgcatattcatcttggtcaaaacctacaagcgtaccggtgtcaattttgctgagcaaatatttagcatgtccaccaccgccaaaagttgcatctacataaagaccaccgttttttggtttcaaattgtcgatagtttcgtgtaagagtacactggtgtgtttgaatttcatattttttatagttcaatgtcgtccaaattttcagcaatatcatcatagtcttcgttagcttcttcttcaaaactagtccaacgttcttttgaccaaatttcaattcgatcagagacaccaatgatgacacattctttaatgagtttggcatgcattttcaacgttgttgtcagattaacgcgaccttgcttatcaaactcacattccatcgcaccagagtagaataaacgcataaatttacgtgtattcctcttagtcaacggaagttttgctaatttagcttcaatcttcgaccactcctccatcgagtagccaaaaatgcagccttccattcctcgcgtgaatatcatcttgtcgccaatctgatcgcgaagtttcgctggtataatcaggcgacccttgctatcaagattgtggtgatattcacccatgaacatggtctagcccccttccactaaataatttaccacaattccccactctctaccacattcataagaaaaaaatacagatttttaaatttcttttttattgtgatttttcaaaataaaaaaaagcccggatttaaaattgaagtgcaacactaagtgttaaacaaaaaggccatgaagacctaaacttgaagtgacgaaaaatcaagaaaggaagatctttatgaccaattcaaattctagcatttctaagcactatcatcaattaaccagcgtacaacgtggacaaattcaagcaatgctggattccggcataacttcccgtactgttatcgctcaagaagtcggctgccataagtcgacaatcagtcgcgaaatcaaacgcggaagtgtcctgcaaagagacagcagctatttattgtatgagcactattacgctgatactgcacagatttattatgagaagcgtcgcaaaaactgctatcagcgcaatccattgaagcattatgctgtctttttgagaatgctctccagacgctttaaagctaaatttgatgccaccagcatcgatgagttcgttggtgaattcaaaaggactatgccaggctacccttgtcccagcacaccaactgtctatcgctatattgatcagggcttgctggacataagcaatattgatctgcctatgaagctcaaaagacgcaggaacaagcgtcatcacagccatggcggtcacgctttgcacaagaagcatcttggcaattccattgaacagcgtcctaaagagattgaagacagaaaagctccgctgcactgggaaggagatctggttaaaggcgtcagacgcaagaatcagcctgctttaatgactttgactgaaagaaccacacgctttgaagtagttatcaagattcctgactatcgggcaagcacatgccaaaggctgcttcaaaaggagattgacagacatcctgcctggtttaaatcaatcacgtttgacaatggctctgagtttgcggatatgaccaagatcaagggctgccagatttactttgctcacccatattctccatgggaaaggggcaccaatgagaactgcaatggtcttttgcgtcaattcttccctaagggcaagagcatgaaagacaagtcaaaagcttatgttcaacaggcaactgatgccattaaccacaaatatcgccgaatcctccaatatcacacagcagaagaactcttcaagcaatatatttcctcatagcctaactgttgcacttaatttgacaattcaggaaataaaaaaaagtcacaaaatattgaaattttgcgacttaagcatatacaagtaattttattttataacactagcatcaataaaagtccgatataccagaaaacagtacaggcagtcaaataatcccataattttctaactgtttttcctaaagaaatatttttatttctaatcgcatcgttcagcgacacaacaatcactaatacaaaatagcataaaaaaccataaggtaaaaaagaaggtttattcatatgtaaagtaattaatccacaagctgaaagaaagaaaaatggcataacatcgtaccctctaaaatgtgctttagggaaaattttattgataaaaaaagcaactactaagccaataattggaattaggaaaatataaagcataagtattcctccattctttttattctaaactataattgatttgaaaaaaaccgttaataagcataaaatattgttcaaataggagggctgtttatggcacgaaaaaagaaaaagaaatcaggttttcaaaaattaactattgcaatggcttggatcatggcaattattactttagcagctgttattgctcaagctgctatctcacttcaaagtttttaaggattaaaaagacgcgaaagaaaaaatcttccgcgtcttttttaaactcgataagcgtttaaatcaattaagaatggataatcctgagctaaattgccccaaatccaatacaagagaaaaaagaagacaactgcccaacctaaactgactaaaatgctcattaataatacgtgtgctgatgcagcactaatacccaccatattaaaaatgagccaactatacgcaacaaaaactgcagttcctaataaaacgacaattaatctagcccataacatttccggtaaaaaacgagctgttttttgacagatccagcaacttgcaggtaggaaaactgtataaacaccgataatgccataaaaatagatatcagcaacaattcctgcacctaatgctaaccaaatttcattatcattagtatcatcaaacagaccaatcaacattacactgattggcaaaatgacgcttgacgctgcaaagttgtcataagtcataaactgatgtaagtaaagtgcacatacaccgtctactaccaatgcaataaataagccaattgccaaaacccattttcgaaacgtagacattaattagccacctgtctttcaattacagttacaacagatggatcactaatatcacctgctggtttaattctaatctgatcagatagaccaaatgaatcacgagttgtcgtagtaactgtaccaattaacaagccttttggtgagttaccgcccataccactagtatatactctcgtgccggccttcagtttgcgaccatcaaccacctgtgtaaaggcaagataattattggaagtaactgtaataataccatgtactgtttttccattcgcagcatccgcttgaacagagaagcgattagccgactcatcagtagtagtaagtaattcaaccttggaagaagcagcatttgcttctacaattcgaccaataacaccgccatcgcacatgacagccatattctttttaattccagctgaacttcctttattaatcactaataaatctgaccatgtatcaggcgaccgagaaataacagaggcgttgaccatggtatagccacttaacgtatcttttaatttcaatgcagacttcaattgcctattttctttttcaagagctgaattgcgagccttcgtctggcctaaattagtaacttctcgctttagatgattgttttcttcttgcgtatttaaaatatcatgaacactatttaatccgcctgacacgagccctactggtacatcaacaattctagtacctaaagcaacgacatcgttacccaagctttgaatcagtaaaggtgtattgcgcctattgcgcaagctaacactcccacccaaaacggataaaataacaactactataataaatgctgataataactttttattttgcagaaattttttcattaagaattgatcctatagaaaaaccggcaacagccggcttttttattatttgcgacttctacgcattacttcaatattcttgagtgattcaccagtaccaattgctacacaatcaagtggatcttgagcaataaacacaggaaccttagttgcttcagaaataacttctggcaaattcttcaagagtgcaccaccaccggttaaaacaataccatgatcaataacatcggcagcaatttctggtgaagtttgttccaaagtctccttaatagctacgataatgtcttgaactacatcttgaatagccttggcaacatcaactgcttcaatatcaacagattttggtaaaccagttactaaatcacgaccacgaatattcattgattcaatttctttagccttttcaactgaagctgaaccaatttgaattttaatgtcttctgcagttctttcaccgattaataagttaaagtttgagtgaacatagttaacaatcgcattattaaacttatcaccggcttgacgaattgaagttgatgaaacgattccacctaatgaaattgtagcaacatcagtagtaccaccaccgatatcaacaaccattgaaccagtagggtccataactggaagaccagcaccgattgcagctgcaaatggttcttcaattacaaatgcttcacgagcacctgcaactctagctgcatcaattacggcacgcttttcaacttcagtaacacctgaaggaacacataccattactgaaggcttggaattaccaacagtcttttccataaaatatttaagcattgctgcagtagtatcgtaatcagcgattacaccgtccttcattggacgaatagctacaatgctgcctggtgttctaccaatcatttcttttgcttctgaaccaacggcgattacttcgcctgtttgtgtattctttgctactactgaaggttctctaagaacaatgcccttaccttccatataaacaagtgtattggctgtacctaaatcgataccaatattctttgtacctaatccaaacacaaaaatctctccttaactgttgcggtctctaaatcttgactaattatagcatactataactttaaaggcgcctttcacacaaattttaaagaactttaaaacaatttttctcacgcaaacttaaatattgaccttctcccacgataaaatggtctaagaaatcaattttcatcatttttgcagcttgacgtaaactttcagttaattccaagtcacttgcagatggcgttaatttaccactaggatgattatgagcaataaaaattccagagcagccataaataactgcccaccgaaaaatttcccgcggatgagcaattgatctattcaaagtcccttgaaatagtttcttctcagcaataatgtggttgctattgtcaatatacaatgcccacaattcttcctgcttgtgtcctatcagcttatcagctaaatacgtacctacttcaatgctagatgtcaaaattgtctttctcttaggtgaagcgcagcgcaaacgatctagtactgcctcagccgtaatagcaagttcatccgagcattctgaactggtaataaactttaatagatcattaaacgaatttaaccctgtgtttttcagaaaaacatttaagtcctgcaacgtatgaattcctttattttctagttgttcaaataattgtgtcaatagctctaaatctgttttgacaaagtaatgatttggttttctttttaacataaaatccccctcattacttattacgcaaaaaagagctaaatttttttcagaaattcaaaaaagttttgacaaatcatcgttgcattctgcttatctttaacagatggtgctttcaaatctggtaccatcacacattttaaccctgcattagcagctgcttgaacaccggttgatgaatcttcaaaaactaaaatattttctttaggtaaattcattttcttagctgcttctagataaatatctggtgccggcttagccttaatgtgacctctttgtacatcaagataactaagatgaaaatcaaaataatttctgattccagtcacccacatagcatgctgaactacattttcataattacttgaagcaatcgccatcttcaagccacgcttttcaaattcgtctaatgcttcttgaacaccaggttgcagctttaactttccctcatcagtccattgccacaccaagtcatcagttcgcttaataaaacgatcacggtctgcttcagttttaaaatatttatgataaaaatcctgcatctctttaactgtagcaccagttaacttgagataagcatcccgcggcgtgcccaaattctcttcttctgccgcctgaatattagcatcccaatacagcttctctgaattaactagcaaaccgtccatatcaaagataatgccttgaatatcatcatctagcccttgtacgcgcatcacgttttcctttccaatttaaaatagcactaaccaaataaaaggatccactaacaattaaaatatcattagctcccaagtgatctcgcagctgggtaaaagcagctcgataatctttttcataattatatcttttttgtacatcaattggaaaatcatcttttttagctactcgcggataagataaagttgtcagtaaaacttcatctttatcatcaaacaagctaaacacctgctcaagatccttatctttcatcatagtcactaaagcataaagcttgccatgcttttgctgggtcatacgatgaacgactgccagcaaattactcattgcctgaatattatgtgctccatctaaaatgattagcggattttctcgtaaaatttgatagcgccctggaataatcgtttgattaatcgctgtttcaacttcttcatttgataaaggcagtttcaacaaaaagaacgcctggcaggcaacggcaatatcataggcttcaacttgtggtcgtaaagcaaaaactagctttcttttgtgatcttgataaacaatttgattatcaagcaaaacactaaagtctcgtcctaattgataaactatcgcatgttcttcttcggctttacttttcaaaattggccaaacaacttctggcacgttacctaaaactactggtctttttgccttaataatgccgcttttctcacgtgcaatatcctgaattgtaggtccaataattttttcatgatcgagaccaattgtagtaataacacttacttctggcataattacattagtcttgtcatgttctccaccaattcctacctcgataacagcataatcacactttttttgagcaaaatagacgaaagccagtgcgacttcatattcaaaggttactaacgaaaaagttgagtcctgctgctgcaatttctcataagtaccctgcacaatattagctgttttaactaaatcctgatcactaatattttgattatttaactgtattctctcattaaattcatagacatacggtgagacaaaaaggccagtcttttgaccagccttttttagtaggtttgataaatagtatgaagttgaacctttaccattagtgcccgtaatgtgaatcgttttaactagatcttgaggattgcctaattccaacaataaccgcttaataaaagacaaattatttttaggatgtaaatgaggcaaagcatataagtaatcgattacttcttgagctttagtaaatttcaattatttactctctttcaaatcttgaattctttcacgaacaccggctaattgactttcgtagtcagccttcttttccttttccttgttgacaacagcttctggagcgtgaccaacaaagcctttgttagccagcttcttttcacaacgagcaacttcgtcttcaagacgcttttcttctttttccatcttttctagctcatcgtcaacattaacaagttcagttaatggaacaaaaatttgtgcgcctggaattacagcagtcttagctaattttggtgcttcaacttcactagctacagtcaattcctttggatgtaagaagttttcaacgtaatcagcattttcgtccaaaacgcgcttgttagcttcatcgtctaattgaatcatgatgtcgatttgacttgacattggtgcattaacttccatgcggatgttacgtactactttaatagtttcaattaagaaggccatgtcttgatctgcttgcttgttttcaaattccttgtgagtagttggatattcagcaaccataactgacttaccttcatgtggcattgaaagccataatttttcagttacaaatggcataattgggtgaagcaaacgcaagatttggtcaagaatccaaattaagttttcttgctttcttgcctttaattcttcatcgtcaccattcaaagcaaccttagaaatttcaatataccagtcacagaagtcattccaaataaagttgtaagcttcacgaccagcttcaccgaattgatattcatcaaacaagcgagttacttcactaacagtatgattcaagcgatcgaaaatccaacgatctgataaatcaaatttagaagcatctggcatatgagctggtttagcatctgctggcaagttcatgattacaaaacgacttgcattccaaatcttgttaatgaagttccaagcagcagataatttcttaggatcataacgagtatcttgaccaggagcagtaccattaagcaagaaccaacgaagggcgtcggcaccgtatttatcaactacatccattgggtcaacaccgttaccaagtgatttactcatcttgcgaccttgttcatcacgcattaaaccgtgtaaaacaacatcattaaatggacgcttgccagtaaagtgcaaactttggaacatcattcttgatacccagaagaagataatatcgtaaccagttaccaaggcattagttgggaagtagcgcttaaagtcttccgcattagtatcaggccaacctaaagttgaaaatggccataatgcacttgagaaccaagtgtcaagtacgtctggatcttgttcccagttttcaatgtccttaggtgtttcttcacctacataagtttcaccagttttcttattgtaccaagctggaattcggtgcccccaccacaattgacgtgaaatacaccagtcgtgaacatcttccatccagtgatcaagagtttgttcaaatcgttctggaacaaagtttactttgccatcagtcttttgattttccaaaactttgtcagcaagtggcttcatcttaacaaaccattgcttagaaagacgtggttcaacttgaacgccagaacgttctgagtgacctactgagtgaacaattggttctatcttaatcaagtaaccttcttctttaagatccttaactaaggcttcacggcattcaaaacgatccataccagcatacttgccagcttcttcgttcatcgtaccatcatcgttcataacattgattctttcaagattatgacggttaccgacttggaagtcgttagggtcgtgagctggagtaatcttaactaaaccagttccgaattctggatcaacgtgttggtcttcgataattggaatgtgacgaccaacaagtggcaagatcaattctttgccaacaatatccttgtagcgcttatcaccaggtgctaccgcaacggcagtatcaccaaacatcgtttcaggacgagtagtagcaatttctacataacctgaaccatctgcaaatggatacttaatatggtaaaaggcacccttatcatctttgtgaataacttcgatatcacttaaagcggtttgaagtgctggatcccagttgatgatgtattcaccacgataaattaagccttcattgtaaagctgaacaaaaacctttttaacagctttagaaagacccttgtctaaagtaaatctctctcttgaataatcaagtgaaagacccatcttagcccattgacctttgatgattgatgcgtattcatctttccaatcccaaacctgtttaacaaaagcttcacgtcccatttggtgacggtctttgccttgtttacgcaattttgcttcgaccttagcttgggtagcaataccagcatggtccataccaggaaggtaaagagtatcatagccttgcatccgcttaaaacgaattaaagtatcttgaattgcagtatcccaagcgtgacccaagtgcaacttaccagttacatttggtggtggaataacaattgaatatgggtgagcttttttgttacctgatggcttaaataaatcttcatcaagccaggtttgatatctacctttttcaacctcgtttgggttgtatttaggtgctaaatctgtcataaaattcctccaataaaaaagtcctagacatattgtctaggacgatcagttaaaccgcggtaccacctacgttaagcatgtatcaaacatgcttctcttgaagacgataacggcgtataccggattaacctactttttattttcaattaatcagctaatcaagctactagtcaaccttcggcctctcagctgtctggcttttctctgttaataaagtcgacccctcttgattcttgctttggttatgattatagcatgaacttcactcagaaaaaagggttaggaattagtcgtaattaagttagccatatgtctttattcttttaataaatcagcaatacatttttccgatgaatgatattgcttatattgttttaacacgttgattaaatcatcatagtgactattccaaaaataataattttcatcataagatttcacactcttaagatcgttataatactgcttaacaaaatcactaggcttcactttacttttatagttatttgtatatcgctgatagtcttgatgataaagaatgtctagaatttcaatctcaggtctagtacgaagttctactacttcggatactttctttttatacacttctggaagattaaacttttcggttttggaatcaagtatcctataaattttaacctttctacttctaaaccctttattcaaaaattctttagcaaactttttagcatttcgtgctctaattacttcaccttcaagaagatcatcctcgttgaattttagtgcatcgtgttccaatagaacttccataattgctcgttcagtatgaccttctacaataatagcgattagatctgtagagttactcatccattttaaccgccttttctgtagccttctttaaagccatgtaggcatcataatctggagctgtcccacctaaataatctgattcaaaaacatcggctttatttagatcgcttcttacatcagcagttgaatatctttgaagctgaatcttgccttctctcttagtaatatattcttcatcagttctttcaattttatccaaaatttcagtatagtgcgtactaaataccaaagtagctctatttatgttgattttaggattagtaaaatactcaataaaagaatctacaatagcgtgattaaagtgattctccaactcatcaataaagatgatgccaccaacggaaagtgcattaattacctcgccataaagagttatccctttagctgtaccagaagacaagtattttgcaatcgttgtaaaatcattttctgcaatctctgtatctttccctttaaacttcagcttaaacaattgtttagtagcaccagagccctcaggcttgttttcaattttaagatattcaattgttggatctaaaaagtttaaaatttctccaggcacattgccagaaccatacatcaatgcattaaagtcagtaaagaacaaagtatcaaatggtatttgaggataatacttatttttcgaaataatcgctctaaaaatcgaatcatcagacgacaaaattgaagaagctaggtcgcctaattcttttctgtctaattctggttttatatttttgaaatcaaataattttttctttgaaagattaacagttaccttttttcgatataccgtttcagactcaatatgccagcttttacttaaagttttctttaacttgaaaactaaactatccttataaactacatgatcagttccataaaaataagttgtaacactaataggctcatttcctattagcacatccgttagcttagtttgatcaattgacttttccatcacaactgtttgaagaattcctatcaagagtttcatgatcgtagtctttccagtagcattagtccctactagagtgattaaattattcacccataaactgccgagcaaatgagttaatcgatcagaggtattagaagtaacccttgcatcactgaccagtgaaaattcaagatcatcctcaaatagcggatgatcttgaatttctaattttaaaaagtataatttatttttattcataattattcacctaaaattgttttattcaggctaaattttatcatatttttgcattttatacataaaatctgtttaaaatataaataatcctcatcaagtagttactacttcatgaggattatctaaaatattctactttctaatcatcttaactgcttgaatcaaaatcgttggaatcagagccaagccagcaagccacattacttcttgcccagttaacggagtaactgcaaacaagctatgtaacgccggtacaaacaaaatcaaggctaacaaaattgttccgacagcaaatgctgctaaactgtaccagttatttttgaaaccgatcttgaagatactgtgttgtgaacgacaattgaagccatgtaaaagccgagcaaatgtcaatgttgagaacgccatcgtcgttgcaactgcaggactatcttttagtccgatcaaaaaggcagcaattacactaatcgaaatcaacaaaccttgaatagtaatttgactcacaaaggctttgtccaaaataccagccttaggatcacgtggcttacgtttcaaaatatctggatcacctggctccattccaattgctaaagctggaagcgaatcagttaccaagttaataaagagcaattgaaccgctacaaatggtactggtaagccagcgagtgaagcaaataaaacagtgataattgctgaaaggttacctgataacaagtagccaatagcgtttttaatattttcataaactgttctaccgttagcaacagctttgataattgtggcaaaattatcatcggccaaaatcatgctggcagcatctttagatacttcagtaccagtaatccccatcgcgacaccaacatcggccttcttcaaggctggtgcatcgttaacaccgtcaccggtcattgatacgatacgatcttttctctgccatgcattaacaattctgatcttgttttcaggcgatacacgagcataaaccgaaatcttctcaatgttttgatcaagttcttcatcgctcaaagcatctaattcaaggccagttaaagccatgtcaccttcattgaaaataccaattttcttagcaattgcaacggcagtcaccttatggtcaccagtaatcatcacagtcctaatcccggcttccttagcacgagcaactgcagctacactttcttcacgtggtggatccatttctgaaacaaggccaataaaagttaagccatcttctgcttcagtagaaagctcttcatcactttctttataagcaaaagccaaaacacgcaaaccattttctgaaaagtaattgttttgtgccaaaatttctttacgatcttcttcagtcattggacgaatttcatcgccgaaacgaatattgacacagcgtttcaagagcacatcaattgcacctttaacaaaaatagttggtacagtatgaatcaaatgcttagtactcatcagcttacgatctgagtcaaatggtacttcttccagacgcttagaatgttcgcgtaattcttgttctgataagcctaaaacaccattacctaagtcaattccgggcacttgacgatacatttccagcaaggctgactcagtcggatcaccaattgccttatcttcggccaaacttgcatcgttgttaagcactacatcataaagcaagtagcggtgaagttgattactcaaatccagctcatttggctttaaaactttaccaccaatatagatgtcctcaacagtcatcttattttgagttaacgtaccagtcttatctgaacaaattactgatacagaccctaaagattctacggctgccaagtttttaataatagcattttctttagccattttttgcgtacccattgcttgcacaatagttacgatagaactcaaagcttcaggaattgcagcaacagctaaagctactgcaaatagcagtgaatcaagcagcggttgaccacgccacatttgaataccaaagatcacagcacacaagattaaaatagcagtagccaatcgtgatgaaaactggtcaagtgatacttgcagcggagtgcgacgttccttagtttcattcatcaaggaagcaatcttaccaatttcagtctgcatccccgttgccgttaccacaaccgtagcacgcccataagttactaaggaactggagtaaaccatgttaacccgatcagctagcggcacttctttttcaaaatcagtgtccaacttgtcaacattagtcgattcaccagttaatgaactttcgttgacttgcagagaataattttctaaaattcgaccatctgcagtaactaagtcacctgcttctaacaaaagaatgtcgccaggtaccaagtccttggcctcaatctccattttttggccattacgcaaaactttagccgttggcgcagataatgactttagcgattctagcgacttttccgccttaacatgttgtaccgtacccaaaatcgcattcagaatcaatacaacaataattaccaacgtactttccagactgcccgtaaaagcagaaattattgccgcgataattaggatgatcaccattaagtctttaaattgttctaaaaagacctgaaaagtaattttcttctttccttcaactaaagcatttggaccaacttgagctaatttctcttgagcctctttagcgctcagcccctgctttaaatcggtatttaactctttagctatctcgtcttttttctgacgatagtattccatgtaaagccctccctaaacataagagtaatttaagcaaaaaaatagagactactggctaaaacactgtttagtcaatagtctcatcatttaaacttacagcggaaaataaatttcgttctgacgccgtaaatacaatttatgccgattactccctatttacttgtacataattaaaccatatcaagtaggtagttggcaagctattttaactttcttttaggaagttttctaattgttcatcggtaaaatcagaaccgtaattttgttcaaggagatgcatgatctcttgcttggtattaccagttcttttaagtgaagaaactaaaattttgacgcctcgtttaagtccctcttctttaccttcctcacgtgcgtcttgttctcgctccagtattttctcttcgtagtccatgatataatcactccattccgagcaataagataatcatttgtacttcttatctttcaataatccgttagcaatatcagccgaactaactggtacaccgactaaacgctcattttgccacaaatcaaaaaaatcagctggcatcatttgatcaaattcatcatctgaattcattaaatccttataaacacgtgacttctcaaataaatttagagcctgcttaggataaatgtttaatctcttagcaattaagtcgctaattgcttcagctagttgctgatgaaattgcttttcactaatttcgggaatcatctaaccaactccttatctatgaacgttaaagctttgagagctctttctgtcttgaaacaatactgctccgaataaacactcggttttaattttagcagagcctcatctaaatctagattaccatgtttccagcaattaacaacagaaaaaagtttaccatctgctgttgggccaatgacgatatcagaattatcttttatattattcattctattttgaatgacaaacttaatccaatcaatatctgcttggtaaactaatattttcaagtcgggttgatcagcatcgaatacatatctatttaatgtcggttgacctgaatatctagccttacgctttgcccatttttctgcttgtctacgattagcagtcacataaaagccattaccaaaatcagttgtaaaaacatttttatttatacgaggctgataaacagcctgattgcttccatgatacaaaatgactttggtattgcttttcatgaatcgtgatgtatgcgtatttttcatcgcgcacctctttcataaatagtaggacaaaattatcctccactatttattacgcaaaaaagcacgatttttttgtgagaaattaaaataaaaaaagaaaatgcctgagaattatatcccagacattcaccaatttacggctctttctcatttctcttccttcacaatataaattggtcgttctttaacttgtaaatagattttaccaatataacggccaataattccgatacacaaaagctgcaaaccgccaatcaataaaataattgaaattgtgctggcccagcccaaaatacttgaaccaggaactattagtttacgaacaattacaaaaataagaccaataattgacaaaatgaatgaagttgtcccaatccaaacagctaagttaagcggtgcttgagaaaaatcagcaatcccgcccaacgcatatttgaataatttgtgagtcgtccaatcagtttcaccagctacgcgctcgacattgtggtactcaagatacttagtcttaaaaccaacccaagcaaaaatacctttagaaaagcggctgtattctttcattgataaaactgcgttaaccatctgcctggtcatcatgcgatagtcgcgtacgcctgaaacaatttccactttagaaatgcgattaatcaccttataaaattgattgctcaagaaagacttaaacttaccttcccctttacgatctactcgtctgcagccaactgcatcatagtcaccagtctgcaaaattttatacatttttggtaaaagtgaaggcggatcttgcaaatctacatccattaagacaatataatctcccgttgcagctgataggcccgcatagatagcggattccttaccaaagttacgagaaaaagaaatatagtgaacatgtttgtcctgctcatgcaattttttcaattcggtcagtgtgttatcattggagccatcatctacaaaccaatattcgggcgtcactttgggcattttagctaatactttttgcactgctggataaaaaagtggaattgtttcttgttcattaaaacaaggaaccacaattgataatttttccattagatttcttctttcttagcttttctaaaagtaactactttattaattacaaattgaattaaagttgctacaaaagttgctactattttaacgattaagtgcggataacccaatttagtaacgaaaataaatagggaaaccgtagtaaataccgtggtaatctgaccaacgataaaataagaaataaatcttaatatcatgcgatcatgaactttaaagttagtataagaattccataaaaagttattgatgatcccgcaggtagacgaaataatgttagctatttcaacattcatcttgaaatgcgtcaaaattgtataaattccaaaatcaacgactagccctaatacgccaattagaacatactttactaattgaacaaaatcttctgaatagattgctgttttgattttttccataattattcctaataaaaaatccagacaagaggtcctggatttcaacatatttaactaatatggtcttaattatatcattgtttttaagctctacgttttcattattaaagttaaaactttaataggaacaccttttgcattaattataatttttgtcattcaatctatctgtcttgttagtatcctcatacaaatgataggaactcttaatcttatgcctgccttgtggatcaaacatgcagagaaagataacatagcaacactttaaatttcgatatgtgctgcatttcaaaatcatacagatttccatcaacatcctcaaccaaaatatcgagaataacagctttttgcttagggtgtttgggatcagcgacctttctctgcttctgcagataatgaatatctctaatctcaatctccggcaccagtccctgtaggacatgcttgcaaaaattcttgttagacataatctcaccaaagattacatcctctgtgaagccaaaccagggcttctttttcttgtgcgtattttccattgcgcacctctttcataaatagtaggacagaattatcttccactatttattacgcaaaaaagtgcaatttttttgtgagaaattgaagttttttaaagttttacccaactatatcttccaacttcaattccagatattctccccgctttaagttagcaggcaagcttaactttcccatcgaaattcgctctagctcaacgactttcatccctaccgcaccaaacatacgcttgatctggtgatatttaccttcacaaattttaatttcagttgtagacctatcgtgctcttcatcctgggataatatcttcaattctgctggctgcagtttggtcccatcgcctagtgtcattcctgaagcaaaagttttaacagttgcatcattagctacaccagcaatttcagcacgataaactttatcaacatgcttaccaggtgcaagcaattcatgattcaactgaccatcattcgtcaaaaggagcaagccagtagtatccttgtccaaacggccaactggcacgattccttgataacggtcctgcggtgcaagcaaggaaatcaccgttggctgattgcgatcttccgtcgctgacaaaacacctttaggtttattcaataagaaataatgatatttttgataagcaacagcatctccgttaacggtaacctgatcgctttctttaacttgctgctttggcgttttaacaatcacatcattaaccgcaacaattccttttttaattaattggtgtacttcttttcgtgagccaacattcatattggccaaatatttatctatgcgcattatgtctttctttcgttcttatgtgttgattaatattaattatataagaaagttaacccaatttcgaattgcgacactaatcaaaaacggtcgattttgttttcgaccgtttttacgcgcgttttgcgcgcgattatttgcttaaaatatattttgtagctctgccttcacccattcttctaatataaccttgtttttctagttgccgcaaaatcttcaaaactttcgtcctaccaaacttactcatttggctaatttgcttcgtagtatccgcaccttcatgaattatttgatatactttcttttcatcattagacagatcgtccgtaataaattttaaaactggcaatattatctttatcgaattatcaaaaatttcaaactgcggttgaaccaaactacttctataagaatcatttattcttcttacacctgtaccaaattgctcaattaatcctaacctaaagaaaacattagcaataattggattacgcaaaatggaaatctgacctgaaagatattcttctttgctaagtccttgtggcaatccacctggagatactacttcaattctgtcatcatacatagaaattttaatttgcgaattaatgttccaaactcgatgaactaaggcattggctattgcctcacgaaaagcttcttctggaatctgacttacaatatttcgcgttgctccctgtatttcttcatgttgataatattgacgatatttttgaattgcttgcttatactctttaagaatagattcatgctcataacttgctcgatcaagcataatattaatgctttcaccaaaccgaacaatatcaattccacgataattatttttgtctgccaaaagctcaccggcattagtgtaactagtatccttacgctctaaattaagcgtaatcaatatatcagatgttaaacttttaattcctatcttttcttttaatgcttcttctaaaatgttaaatgacaaattttggttcatcgcggttaaactatcataggttctattttcaccaattaagattaactgtgataattcagatcggtccacttcgatcgaagcactgtcattactcttataggcctttgatttgtataaatatggaggattaactccttgctttactgttaaagtaaccacattagttttaggatcaatttctaaattataatctggatttggtttgatcgaatcgttgattttattttcaacatttaaacaaaattcaactggatttttcacaccaacgattgatccatcatcctttattccaaatttaattttgccactgccataatttgcaaatgcactaaccgtttttagaaaagtattcgtcaatttctctttaaattctaaatttttggtttctctcatttaggtcaccgtttctaaactatttagttataattatactctttcacgcgcaaaaaaacggtcgaaaacgaaatcgaccgtttttacgtgcgttttgcgcgtgcctattatattaactttaaatcaatacataatactactagaagtttccatattaacaccatatctttctaaataattaaactgtatcatattaaatttcaaaaacaccagtgaaattaatcctctataacaagtcagcgtcttcttgagctttatcatccaagaatttttcatttggataaattggcgtaatctcaataccagccattgccctttcaatcaggccttcaacgtcaagacgagcttcatattcacgcgctttttccaactttggcttagtcttaggacgcggtggagcaaaaattgtacaacaatcttcaaaaggttgaattgataaatcaaaggtaccaatctcttcagctttggcaataatctccgttttatccattgttgcaactgggcgaataaccggagtagtagttacatcattgatagccaccattgattgcaaagtttgagaagcaacttgaccaactgactcaccattaaagatagcccagccgccacgttgtgcacgaatgcggtcagcaagctgcaacataaaacgacgttgcacagtcatcaaatagccttctggcagtttttccttgatcgtttcttgaatttcagcaaacggtacggcaataaaattaatcttaccagcgtagtttgccaaaataccagtcaattccttagccttagccaatgccttttcagtagtgtaaggtggactaaagaagtgaaccatttcaatatctactccgcgcttcaatgccagccatgaagcaactggggaatcaatcccaccactaagcatcatcacagccttaccagcagtaccaacgggcatcccgccaacaccatggagcaactgattagaaatataaacggcatcttgacgaacttcgattctcaagaccaaatcaggatgcttcatttcagccttcaagccatccatatgatcaaacaagtagtcaccaactagattattcaattgattagtgtcgtattcaaacttgtggtcactacgcttggtattaaccttaaaagtcattcctggcttaaaagtctcttgcatcaattccaaagaagtcttttcaatatcttcaagagtcttaggaatcttaattgctggtgagtaagtttgaattccaaataccttcttcagacgttggtcaacatccttgaatgatgcgccattcaggacaatgtgcatccgatcatgacgaggatgaaattcaatttgtgggaaatccttaagaactttttcaacgttacttgctaagcgattgatgaagtcctttctgttcttccccttagttgaaagctcgccatagcgaaccataacttctgtgtattccattaattttctcccaaatgattaattttagcaaaatgattatagatcttgtcaaagaccttaataaattcatccgcttcttgaagcgtattcgtctcatcaaaacttaaacgaattgcactagtagcaatcttatcatcaattcgcatagaaaccaaggtgctagcctcatctgccgtctttgatgcacaagcagaagtagttgaagtataaatatcttgatcttctagcgtatgaaccaaagtttcgccccgaattccctctaaagcaaagcaaagaatatgtggtgcaaagccatcgcttactggtgaaaaaatattaatccctggtttatcttttagataatcaacaattttagccttaatttctgcttcacgcttggccttttctggttcatcttctaaaagcaaacgaattgccatagccattcccgcaattgcaggcaagttctcagtacctgaacgcaagcccttttcttgaccaccaccatcgtgtaatggggtcagcatcttgccttcttttttatataaaatacctataccacgtggtgcatggaacttatgcgcagataagctcgagaggtctactcttggtgtaaaaaccttatcccaaatatttttgccaagtgcctgaacgttatcaacatggaactgaatcgttggataattttcaagcaaatcgctaatctcatcaattggttgaatggtgccaatttcgttattaacgcccatgattgaaaccaaagttgtatcagaatcaatcgcgtttcttaagtcattaacgttaactcggccttccttatcaactggcaatctggtaacgcgccaacccaaattctctaacgcgttaaaactattggctacagatgcatgttccacgctagaagtgataatatgcttaccaaattcacgcttttgaattgcagtccccttaattgcggcattatttgattctgttccaccagaagtgaagaaaatttcatgctgcttagtccccagcaaatcagcaatttgtttacgtgacgcctcaagcaattggtgtgcacgatcacccatcttatgcaaactcgaaggattgccccaaatattagtcgctactttattgtaagtatccaatacttgtggatctatcttcgttgttgcactattatcaaaataaatcactatcattaccccttcatttaaaaaacggtcaatcgcttgaccgtttcaagacttttcaattttagcttaaataatgaatcgcttcaattaattactcttctcttctgaataatatgcattttcaagtcgttgataactacctggctctaccttttcaattgctgtagcaattgtatcaagggcttccttatagttatattcattatatagctgcattgctgtcttttgtgcttgcgcaattgaatccttatctgcatatttatttgaatactgcatcgtcaattcaactaggttagcggaattaatgatgtcatctgcttcacgtttaagccgctccacatcatcagaaatttgaattaattcagctgagatcttttccatattaatccggacctgacttaattcgttgctgacatgaccaatctcgttgactaccaaagtgtacatttggacaaagctatcaggattgccaggcaaatttcgtctttcaagtcgacgataaactaatgaaacttcttgcttaaagcgcttgattgaatcattagctacattttcagaatcataaagtccatcaacgtcagttgacatcttagcctgctctgcatcaatttcacgcaggcgatctagcatctggagccatgaatcttgaatagcagagtaaacacccttaccatctgcgatattctgtgtatcaatagtgtactgatggtacatttcattgacttctttttctaagtctttactcttttccaattcgccatgagtcaattcatagctctcatcaatatgccgcaacttttctaccagtttctttgacgcggtttgctgatgtgagatcaaagtcagcattttactttgatttttttcaacaaatggtcttgccttgtattccttagctaaaacatcatacaggtcgtcaatttcgccagagatctttttattttccttggctaattcatccaccttagtctcagctagcaatttgcgcgcaccatcaatttcatcatgaatttccttgattctgcccaaaacatctacgctagtaaggtaatatttttctgaaatcatttttttataagcatcagacaattccttaagctgatcttggaacactacttcaagctgatgataaccctcttttagcggttttaagcgtttttgtaagttacccaaagacatccgaatcttggacaaaactcgcttagcttcaacatgatcaccttgtgaagaaagattttttgcttcttcaaagtcactctccattgatgctagttgatcttcaacctgatcaatcgcagcaccatattcaaaggaattggctaagatatcttttcttaattcacgataaactttaatcaaagcatcatattgaatttgattttccttatttgattcaagtagttccgtgaaaactgccttggtgttacgagcatcttcgagcgttggcttgataatctcctgtgcttgtttaatattctttcttgctttaaacaagcgataagttgcattttcattagcagcttcttcaactagcttatgcactcgcggtaattttttcttagctgcttcagtgtagctcttgcgccaagtatttaatgtagttaaactttcgccggccaaatccattttatccagtcgcgtaatatcatcttctagatgcatcttctcaatttcagtcactgctgcatcaatcgcttcaatttcttttagttgtttacgattgatcattagcattgctgcaactacgacaatgattaggataaccacggcaataattataatagcttgaattgatgacatagtttatcctccaaaactatcataattataacaaaacctgaccctaataggtgcaaaaagctgttctattttcttgatttattattctgagctctatataatactattcgtgtaaaatatttgcagcaataagtgacaagaacgtcaacatcttgaaacgctttagtgaacgagtaacccgcgctgcattgggcgaaaatgtaaatccaagatgcacgaatgttgaacttatgcttaatattttactccaaaaattattgtttaaattttatggaggattttttatgtcaagatatacaggtccaagttggaaacgttcaagaagattgggtatttccctttcaggtactggtaaggaaatttctcgtcgtaactacgctccaggtcaacacggtcctaacaaccgcggtcgtttgtcagaatacggtcaacaattgcacgaaaagcaaaagttacgttggatgtacggcttaaacgaacgtcaatttagaactttgttcacccgcgctggtaagattcgtgaaggtcaacacggcgttaacttcatgattttacttgaacgtcgtttggacagtcttgtttaccgtcttggtttagctactactagagaacaagctagacaattggtaaaccacggtcacattactgttgatggcaagcgtgttgacattccttcatacgaagtcaaggttggtcaaactattggcttgaaggaaaagtcaaagaacttacaacaagttaaggatgccttagaagcagttactgctcgtccatcatttgtttcatttgatgaaaacaaaatggaaggtactcttgtacgtttaccagaacgtgacgaaatggaaccagaaattgatgaagccttagttgttgaatggtacaacaagttactttaatttttacattttattttgtcgaaagtctttctcaatcgagaaaggcttttttctttgctacaataagtacataaaaagaaaggatgattagatgactgaagatttaaataaacgtgttgaacaagcagctcaaggtattactccacaaactaagcctgatgaacgccgcagatttttaggttcattacgtgagcgctgcttaatccgtatggacaatactgaagttaaaaatcctgaattaactgccctatttcttaaacatatcactgactttaagggctatactattttgatcaatggcaatatcactgatgatggcttcttgggagacattgaagccagttgcagcaaatatgatattcccttcactttagttaacaatgaaaccgcaaaaacaggaccacatgatacggcagtactagttgtagcgaaaaacgctatcaatcgaccacgaattgagctaaagcaagtttatccacctgagtttcctaaagaagaattagccgcacctaaaacaaaagaaagtttttggcataaactttttcacggagataagtaaatgaaaccattagcatatcgtatgcgaccaactaatttagacgaagttgttggtcaaaggcatctgattggtcctggcaaaattattcgccgaatggtggaagctagacttctgtcttcaatgatcctttacggccctcctggcatcggtaagacaagtattgctagtgctattgcaggctcaactaaatatgcctttagaaagctcaatgcagctactgacggcaaaaagcaattgcaacaagtagccgaagaaggcaaaatgagtgggacagttgtcttattgctggacgaaattcatcgtttggacaaaactaagcaggacttcttactgcctttgctagaatcgggacaaatcattttaattggggcaactactgagaacccttatatttcgatctcccctgctattcgttcacgttgccaaatttttgaattaaagcctctttctacagatgatgcttctcatgcaatcgatcgcgcattgaacgataaagaaaaaggtctaggcaaatataatgttgaattaacagatgatgcgcgtgctcttttgattgaaaaaggcaacggtgatttgcggtctactttgaatagtttagaattagctgttctttcaactaagcaagaattgcaagataaacaccaaaatgatcaaaaaattatcatcactcaaaaagaaatggctgattcaattcaaatgaaggtgcaaaactttgatgcttctggtgatggacattacgatctagtctcagcatttcaaaaatcaattcgtggctctgatacagatgcagcgctgcactatcttgcccgattaattgaatctggtgacttagtctctatctgtcgaagactagcagtaattgcctacgaagatattggactagccgatccagacgcagctgaacacgctatagtagccatccaagctgcacaaatggttggcttgcctgaagcacgaattccactggctaatgcggttattgagttagctctttctgccaaaagcaatagtgccatttcagcaattgatgctgcactagctgatattcgaaccaaaaaagttgactcaattcccgccaacctaaaagatgctcattactctggtgccaaaaagcttggacatggcgtgaactacctttatcctcatgattatcaaaatgattgggtagcacaacaatacttgcctaataacctgcttcatgccagctactttgcacctaaaggcaattctaaaatcgaagctagatataaggcaacctatcaaaaattaaaacaaatgcagtctgataacttgcgcaataatcactaatctcgcgcattcaatatggttgacaagcacctgtaatatgcgtattataataagtgatctgagttgatcgacaagcttaaatgtataaagttgaccgatcaaactataagacgtgggagttggcaaataactaccgaatcggaatactgccttgttgcaggatccatattcgctgcgatgccagctaaaattttgaacattgcgggttcaacaagcgtcattatgctatgtttagtcaactcggatttctttagaatattaaaaaaggcggtctcaattgaccgtctttttctatagtggagactgttaaatggcaataaagattgtaatgattatttttatccttctcctactgttaacctcgtggtacatgtggcacagaaggaacggacattttttaatttatgacattggtggcgatccacgcttgagcaatattcttaagtggacttcagtcgcccttttagctgaaagtattttagggattattttgctattcatgggtaataaatatttaaatctaatcaccttattcttagcttcattaactattttggcttttggtttatcaattactcaaaataaagaataataattcactaatgacaagcaaaattttggtaaaatagaatatagaaagaggtgcttatatatgctttcacaatacaagaatattcaagttgcagttgatggttcaaaagaagctgacttggccttcagcaaggctgtagccatcgccaagcgtaaccatgcaacactagaaatcttacacgtaattgatactcgttctttccaaaatgtttcaagttttgattcagcaatggtagaacaagtttctaaagatgctgaaaagagaatgaaggattaccaagctcgtgccactaaggctggcgctgaagatgttcactactctattgaatttggttcacctaagacaatcattggacatgacttccctaagaagcacaatattgatttaatcgttgtgggtgctactggtttgaacgctgttgaacgtctgctcatcggtagtgttaccgaatacgtaaccagaacttctaaatgtgacgtcttggtatgtcgtactgaagaagttaaggatgctttgcaaggctaattatttagctttaataaccgataaaaaaatacctccaaaattcagatttgaatttttggaggatttttttaatgttatttctaaaaatcgccagccgtactgaacatgtaatcacgattatggaacttcatcgacaagattaatccaatcccaatcatgtttcccatcagagctgaaccaccctgagaaacaaatggcaatggaatacctgtcaatggcaataaatcaatattcatcccaatattttcaaatacgtggaacaagatcatcatgataacaccagttgcaatgtatgaataaaagacatttctggtatcgaacgagatttttaccatttgaataatcaggtataaataaatcaaaatcaatgctacacagccgacaaaaccaaagttttcaccaattaccgagaaaaccatgtctgatccacgaactggaacataaacgctagctttgccaaaaccattaccaaatagttgaccagaaccaatggctttcatactttgccataactgataagctcctgatgaagtatcaccagatggatcgagccaagacttaattcgttcaaattgatatgcttgaaagaaatgactcaacaatgattgcccagccgacgtagttactaatacaataaccccaatagctgctaaaatcaaaataccatataacggtacaataattttccaagaaatccctgatactaaaaccacgccaccaacgatggcaataaatactaacatagtaccaaagtcattctgtaactttagtaaaattgctaccggtgccagccaagcaataattttgcctaataacaaccaatcggtcttaatcgtgtgaccatatttatcattatgctctttgaccactcgagccaacatcaagataaaagctggcttcataatttctgaaggctgaaaagtaatcggccctagtttgaaccaacttttcgcacctgtatctgcagctacgcttctgttatataagaatagcaccgcaatcagcaaaaatattccgattccaaagaaaattggcgcaatcttaaacaactgttctgcatcaaactgcatcacaaccataataattgcaattgaaatcaagtaccataatgcctgcataactactgccctaacaggtgaaccaatatgactaggatcacctaatgcagcaacatagatacaatacaagctaattaaagccaagagtagcactggtataataatattccaggctaatcgatcgaatagacttgtttcattttcaacttttgccattaaataatcactacttatattttatttttcatgtaaggtaaagtatgaaagtaagtcattaatgctgctttcaagactgttagcaaacaaaatattgcttgtcttagaagtagtagcacgataacgcccctctaccttttcaattaaaccaatggactttctattaggaataacaacttcccacgttggcaaattctttcccttaagttcattaacttcaatatcaatattctctaattttttagacataaatcctcctacttgctatccggatgaaattttgaagcaataattggatcttcatatctctccggatgtggatttcgaaaaatagtaaaattatcaggaactggatccactccacccttgataaatgggttacaccttagtatacgacaaattcccataatcagccccaaaataggaccatgttttttcaatgcatcaatcatgtaattggagcatgttggataataccgacaacttggtggtagtaaaggtgaaatcactgtctgataaatacgtacaataaaaatcaaaatcttacgcaagtaatctcctcacttagtgtcgttgatgcttttcaatatttttaagcaaagtacctgttcctaaagcaactgcttctaatggatgatcagcaattaaaactggaacttgcaaataataagaaatcaacttatcaatattctttaatagggctccaccacctgttagcatgattccgcgatcaataatatctgctgaaagctctggtggagttgtttccaatacttctttagctgctgcaatgattgacatcaagcctggttctaaagccttttgaatctctggtgcagtaactgtagtctgcttaggcaaaccatcaactacgtcacgaccacgaacagtaatttgttcatcttggtctggttcaaaggcgctaccaatttcaatcttaatttgttcagcagttctagaaccgattaacaaattatgcttactcttaatgtaactgatgacagcctggttcatccgatcgccagcataacgtaatgattgagaagttacaatttcacccattgataaaactgcaacgtcagtggtacccccaccgatatcaatcaccatattaccttgcggtttaaaaatatccaagcctgcaccaacagccgcaactttaggttcaaagtctaaataaaccttgccgccaccagacttttcagctgcctgaataattgctttttgttcaattgaagtaactccagtaggagcacaaatcaaaatatttggcttggacataaagccttttacatttaatttttcaataaagtaagacagcattgcttcggtaatgtcaaaatcagcaattaccccattcttcaaggggcgaattactcgaatattacctggagttcttcctaccatctcatatgcctctgaaccaactgcaactaccttgtttgtatcggtatttacagctacaacagaaggttcatttaatacgatacctttaccagagacattgatcagtacgtttgctgtccccaaatcaattcctatatctcgtgccacgataaccctccataattattcaccgtccattttaccataaataatcatgactttcctttactgtccttgttttaacacaatctttaaaacaaattactcaattgcattgaagtatcgataaaagtaatgacaaaattgccaactaaaaagcctaagccaattgcaataaataaatataataattgcgtttcaaaaacatggcctttacgaataattttatctagttgaattgctttaactgcttgaaaagataagccaatcgcaatcaaatatataatgatactaataatgacatgaacgcctaattgaaacatatattttcctcaattttgacaaaaaaagacggatgcagcattttgtgcattcgtctcttccttcttctagtgacctttagtgttgtacacgctaattctgttcattgctcgtcttaaagcaacttcagcacgtgccatagtttgttcgtcatgtttttcccgtgcttccttcaaacgttgctcagcgcgttgcttcgctgcctcagcacgagaaacatcaatgtttcttgcgcgttcagcactatctgcaataatcgtagcaacattattcgaaaactcaatatagccacccgaaatcgcaatatgatcaactactgaatccatttcacggcttcgcttaatcttaacctcactaataactagtggagttaaaagtggtacgtggttatacatgattgaacgttcaccatcaacggcacgtacatcaacgatacttccacgatgtgaataaatcattccattaggagttacaacatctactttaaaaagcttctctggatctgccatttgacatcaccctacttttctagtaaagctttagcttctggatcacttggagttacacccatttcttgtgcttttttcaaaacatcttcaattgggccgacaccacgaaaggcatcttctggtaagtcatcaagatgaccatccaaaataagcttaaagcccttaatgctttccttaattggaacatatgaacctggtacaccagtaaattgttctgcaacaaagaagttttgtgacaagaagaattggaccttacgtgcacgtgcaacgatcaatttttcttcatcagacaattcatccatacctaaaacagaaataatatcctgtaattcatggtaacgttgtaaaacatgttgtactcgagtagctacttcatagtgttcttcaccaacaacttcagggtcaagggcacttgatgaagattcaagtgggtcaacagctggataaataccttgttctactaagctacgttccaagttagtagtagcatccaagtgtgcgaatgtggttgatggagctgggtcagtatagtcatcggcaggaacataaacggcttgaattgaagtaattgaacccttcttagtagaagtaattctttcctgcaattgtcccatttctgttgctaaagttggctgataaccaacggcacttggcatacgaccaagcaaagctgaaacttctgaaccagcctgagtaaaccggaagatattgtcgataaagagcaacacgtcttgaccctcaacatctctaaagtattcagcaagtgtcaaaccagttaacgcaacacgcattctggcaccaggcggctcgttcatctgaccaaataccatggccgttttacttaaaacgcctgaagctttcatttcgaagtaaaggtcgttaccttcacgagttctttcaccaacaccagtaaatacggaaataccaccatgttcttgagcaatgttgtgaattaattcctgaatgatagtagtcttaccaacaccggcaccaccgaacaaaccaactttaccaccacgtacatatggctcaagcaagtcgataaccttgataccagtttcaagaatttcacgactagtagtcaagtctgcgtacttaggtgcttccttgtggataccttcacgagggtgatcttttgaaaattctggaccaccgtcaattggttgacccaaaacgttaaacacgcgtcctaaagtatcttcaccaactggaacggaaattggaccgccagtatcttcgactttcataccacgacgaagaccatcggtagattccatggcgatcgttcttaagacaccatcaccaagctcaagtgtaacttcaaggacaatgctttcatcctctgacttaattacacgcaaggcattgttaatatcaggtaaattcttatcaattgggaatttaacatcgacaactgggccgattacttgaacgatttcaccttcactcaaaacatctacctccttttctttattactctaaggcatttgcaccactgataatttcagtaatttcagtagtaatttgtgcctgtctagcacgatttaattttgtagttaagtttgataccagatcattagcattatcagtcgcactctgcatggctgtcattgaactagcatgttcggcagtcttagcatccaaaatagcaccgtaaatagtagaacgtgcatattgtggtaacaacttcattaacacttgatttggatctggttcaatatcgtattctaattctttatgtgcttcagcttctttgacaccaatatctaaatcgacgattggtaacattttttcaacacgaaaagcagatgataatgagttaacgtggtgagtataacatacgtaaagctggtcatagacaccattcaaaaacatcttaattgcggttgaaacaattggtaaggcttcatcaaaagttggtacatccgaaacaccattcttttcataaacaacgttaatattgttctttttaaagaattgtgccgcaaccgaacctacagcaagaactttgatatcgtgtccttgagcacgttcgtcctcaaagatactcatcatattcttaatgacattgctgttataagaacctacaagaccacggtcacctgaaattaccaagaaacctgttgtcttgatattcttacgtggctgaatcatatctgccgtaatccccaaaccaaagacatcagtataatcaatttgagcaacattgttcttatcaattgagacgtctttttcacgtatattatcaactacttctgagctaattaaacgagaaatagttctacgaatatggtcgttataaacggtataacctttatcacgattttcagtttggttcaactttgaagcagagaccattctcatagcttctgtaatcttaccagtttgttttactgaagcaatttttttctttaactcaagtaaagatgcaggcatattctacctcctatttctcacttggtgtaaagctctcactgaattcttcaattgctgctgacaatttcttatcatctggcaattgaccagtttcacgaattgtcttgagcaaatcagcatgactgctgtcaaagttatcaaataattcgttttggaaacgagcaatatcttcaactggaacagcgtcaagatatccgtgagtcaaagcataaagaatcacaacttgcttttcaacaggaattggatcatgaagtggttgtttcaatacttcaacggttctttgacctctattcaacttagcttgagtagcttgatcaagatcactaccaaattgagcgaaactttcaagttcacggtaagctgcaaggtcagtacgcaaagtaccagcaaccttcttcattgccttgatctgggcgttaccaccaacacgagaaactgagttaccagcatcgatggctggacgagtaccagcaaagaacaaatcgctttgcaagaaaatctgtccatcagtaattgaaattacgttggttggaatatatgcagaaatatccccagcttcagtttgaataattggcaaagctgttaatgaaccgccgccaagtttgtcattcaacttagcactacgttcaagcaaacgtgagtgtaagtagaaaacatcacctggataagcttcacgaccaggcgaacgacggagaagcaaggaaagttcacggtaagcgacggcttgtttggataggtcgtcaaatacgattaatacatccctgccattgtacataaattcctcacccatagcagtaccagcatatggtgcaatataaagcattggtgctggctcacttgggcccgcttcaacaacaatggtataatccattgcgccaaaacgctttaaagtttctacttgagttctaacggttgattccttttgaccaacagcaacgtaaatacaaattacgtcttgccccttttggttaaggatagtgtcgatggccaaactagttttaccagtcttacggtcaccgataatcaattcacgctgaccacgaccgattggaactaaggcatcgatagccttaataccagtttgaagtggttgatcaactgattgtcgatccataacccccggagccttggcttcaattggacgactcttgtcagtcttaatttcaccaaaaccgtccactggttgacccaatgggttaactactctaccgattaaggcgtcaccaacaggaacttccatgattcgtccagttctttgaacacggtcaccttcacgaatattgtcaaattgacccaaaataatgatacctacatcatttgattcaaggttttgtgcaataccgtatgagccgttatcaaacttcaataactcaccggacaaaacatcgttaagtccgtgagcacgggcgataccatcaccaacataagttacaacaccaacttcgctgatgtcgagcttatcgtcgtaatgttcaagttgttgcttgatcaaggaactaatttcttccgctttaatactcaatggtttcacctcttttaatttttatcaattatctgcgcacggatcttcttcagtttattcttaactgatccatcaatcacgcgatcttctacttgaagaaccacgccgcctaaaatacttggatcaactttattctctagacgcaccacgtttaggttatatttcttagcaaaactttcacctaaacgcttgagttgatcatcatctagcttaacagccgtagttgcaacgccagatgcgaccttcttttcattatcataaagtaagacaaagcgatcaataatatcgatcaaatcagcaaaacgatcatatttaaataacaaattcaaaaagttttgaacatcatctgaaaaatctttttcaattgcagtcaaaagatcctttttatctttactacttaaaataggatcgctcaagacactaatgatttgtggattggcttcagcagccttttttaattccaccatttcattataaacagtgtctaatgcatcattgtcttgcgcataaccaaatagtgcggcaccgtagcgtgctgcaatttcttctctacttaaagccattaatcatccaaccccttaataaattggtcgactaaatctttttggtctttagcagataaattcttagcaattactttttcagcgattgctacagaaatatcagcaacttgatcgcgtgcagaattcaaagcgtctgcttttgcctgagcggcatcttcattagcctttttgcgaattgctgcagcatcttcgtttgcatttgctacgatttctttacttgtgttttgcgcgttactcttagcgtcagagagaatttgtgttgcttcttgtcttgagttcttcaaggcagcttcacgctcattagcaagcgtttcagctttctttcgttcactagcagctgaatccaagtcatcaataactttttgccgccgcttttccatcatatctgatactggtccccaagcaaagtgcttaataagaagcatcaagatggcaaaacagatcaaataccagatagcattacctaagtaaatatgtgaggctgcaaataatgtttgaatagtcatttactgcccttctctctttaatactattcctttaaacagaaaattatctctttttattaaaggaacaaaatcaagaaggcaacaacgatagccaaaataggaacggcttcgatcaaaccaacaccaataaacattgttgctctcaagttacctgcactttcaggttgacgagccataccttcaagagtctttgaaataactttaccgttacccaatgatgcagccaaagctgctaaaccagctgcaatggatgcagcaagatatttaaaagcttctgacataaatttatacctccaaaaatttattctgtagtaaccttcttaccaatgtaaaccattgataaagttacaaaaacatatgcctggatagagccaatgaagacagagaaaccttgccaaatcatggctaatggagctgccaaaactaacgtaaatggtccaccagcatgtgctagatcattaccaattaaagttagcaaaacttcaccagcataaatattcccatatagacgtaatgataaggttaaaaagttggtaaactcttcaattaaattaattggaagcataaaaccaactggttgcgtatagctcttcaaatatccgccaacaccaaatcgttgtacgccgaatgtgaacgatagaagcaaggtcatcattgcaaacgacattgtcgctactggatcagcagttggtgatttaataaacatccaatcatcaactttgacttccatgaacatccctaattggttcataaaccaaataaacaggaataaaacaaatgcatataatgacaggtgattttgagcatccttgtcgctaacgttatctttaacaatgccgttagtgaaatcaagtaaatactcgaacacattttgtctcttattgggtttcatttcaacttttcttgaaagccaaatgcagataaataaaactgctaaaaccattagcgttgaaccgataataccagaaagttcaaaattcaagcccatgaatttaaaaacaaatgatttctccattacttcgtgacctcccttctcgtgctgaataaaactcgaacacgtaaatcatcttaacaccaaaaaaggtctttgtgtaaaatgaaagcgcattagagaaaatatttttctaaaaaggacgattacttagtaccaaatagtctgtcaccagcatcacccaaacctgggaaaatataaccattatccatcaatttgtcatcttcagcagctgcataaatgtcaacgtcaggatttgcttcttgaactgccttaataccttctggagcagctaccaaaacagcaagcttaatttccttaacaccacgcttcttcaatgcagcaatggcatcattagctgagccaccagttgcaagcattggatcaacgactaaacattcacgttcagcaatatcctttggagccttgaagaaatattcatgtggcttcaaagtcttttcgtcacggtacatcccgataacggcaatcttagctgaaggaaccatttcaaggacaccattaagcatccccataccggcacgtaaaattggcacaattgtcaacttcttaccagcaatttccttttggacagtcttacccattggtgtttcaatttcaacatcttcaagtggcaaatctctagtgatttcataggtcattaacccaccaatttcaccaacaatgcaacggaattcatttgaccccgtatccttgcgacgaataatagtcaacttgtgttgaatcaatgggtgatccaaaactacgaactttcccatatatgcctcctataaaaaataatatgatcattaaatattttaatcaaaaacgcaaagggtttaaagccctttgcgttttattttttatttattgaaatgatgtccacctgcagctttattcaatcgattcatgtaagctaaactttcttcaccttcatgaaatccttgtacataaatagtttcgatatcatcttgatcatcgaaatagcgcaagccaccaaataagttatggtcggcatcaactaaattgttgcccagatcaaatttatttgcttgaggtaaattaattttagctaagactggcgctaaagctgctacaccagttttttcattaaaatcaatttttgcaaaatcagcaggatcatcaaccacgactaccggctcacttggagcataatgacggtatttcattcctggtgccttaggtatatctttgtctgacactttgcccgtgttaattaaaactttttcacctaaaacttcgcttaactcttctggagtaatttcaccaggacgaagaacgattggtgtttctaccgataagtcgataattgtcgattctaatcccacacgagtagggccatcatcaataattccggcaatcttcccttttaaatcatggtaaacgtgctctgcagtagtaggactaggcttagttgaggtattagccgatggtcctacaattggataacccaatttagcaattaaatcatgagtcaattgatcatcaggacaacgaaatgctacagtatcaagtcccccagtaactgcatctggcagagttcctggtttaacaaacaatagcaatgtcaaaggacctggccagaaatgtttaattaatttcttagctctttctggaacttctttagcatacttagccatcatttcttcgtcagaaacagtaacgatcaatgggttatcacttggacgtcccttagcagcataaacgcccttcacagacttttctttggttgcaattgcacctagaccatagactgtctcagttggaaaagcaaccaattcacccttagctaacaacttaactgcatcattgatttgatcttttttaaaaatcttcgtttccatcattcttatttttgccaccttccatgaaccatgcgtggcttgccggccatatcttttctaaattcgatttcaaaatcaggcaattctttagcaaacaattccttcagttgttcttcttcgctaaaaccaaattctaagaaaaattctccatggctattcaaatgctcacgcacttgcttagcaaatttcttatagaagtctagaccatctttgccagcaaaaagagcttctttaggttcattttgcaagacattttcatccattacattcttttcgcttgtcttaatatacggcggattagagatgatcttatcaaattcttctaagcccaacagcacgttggctttacgagtagttacatcaagatcataagttaaaaagttttcctcacttgttcttaaggcagtatccgttacatcactagcatataaagttaaatctgtaatgccttttttctgtgcttctttagctaaagccacggtaatacagccagaaccggtacccaagtcaaggacttgatcacctgatttaagtgtctgcaatgcccattcaaccaattcttcagtttcaaaacgaggaatcaagacaccgcgttgcaccataattttatagcccaaaaaccaagcataacccaaaatatactgtggagatatgcccttagccaatttttcgatatctttattggcctgcttaatctggtcagcagttaagtccatttcttgcttcagttcaaattcacttggtgtcaagcctaagcgctctgctagaacataatcaacatcctcaggacgcgcattttcagcactctcacccgctttaatacgcatctgctttaaagtcattttaggcattttgatcagccaactcctctaattgcttagtttggttgtaaagaattaatgcatcaataatttcatcaagttcaccgttcatcacacgatcaagcttgttaatggttaagccgatgcggtgatctgttacacgattttgtggatagttatatgttctaattctttcggaacgatcaccagtaccaactgcattctttctcttagcatcgtactgagcttgattttgactttcataatagtcataaacacgtgatttcaaaatttgcattgccttttcacggttctgttgttgactacgttgatcctgcattgcaactacaatcccggttggcaagtgagtcattctaacggcactagaggtcttgttaatgtgctgaccaccggcaccacttgaacggtaaacatcaacacgaatatccttaggatcaatatcaatgtctacttgctcatattcaggcataacagcaacagtggcagttgaagtatgaacacgtccttgagattcagttactggaatccgttgaacacggtgtgcaccattttcatactttaatttcgaataaaccttgtcaccagtaatcatgattgccacacgtttatagccgccaacctcagtaggttctgaatcaatcattgaaaccttccagttttgacgttcagcatatttttcatacattctaagcaaatcgccagcaaacaaagaagcttcgtcaccaccggcagcaccacggatttccatgataatatctttatcatcgttaggatccttaggcaacatcaaaatcttgatttgatcttcaagctcgggaatttctttctcaatttcagaattttcttccttagccatttcaattaaatcaggatcagtttcactggagataatttctttattatcttcaatctcttttttgtcctctttgtacttcttatatttttgtactacttcacgcaaatcggcttcttccttagaaatctccatgtagcgcttagtatcattaataacttcaggatcggccatcatttcctgaagttcttcatagtgagctactagaccctctaattgagccataactttatccataaactaaaaatcctctctatctttcaacacctgggtgaaagtaatgatagcgacaaacaggataataactttcatcgccaccaatttgtacttgttcaccctcataaacaggcttgccattgttaattcttaaattcattgttgccttgtgtccacaataatgacaaatggtcttcatctcttctattttatcagcaaaaatcaataaattttcactaccttcaaatagatgattttgaaaatcgttttttaagccaaaggtcattactggaatattgaacacatctacaattttagcgcattctaagacatgatgtctcttcaaaaattgtgcctcatcaattaacacacaagctagtttaccatcaccatcagcaacatctgctttgttcatctttttaatataatcaaatagattcatatcagcagtaattggaattgcttctcggtgaagtccaattctagaagcaaccgttcctacaccgctacgattatccaagccactggtcattagggcaatcttgcgcccctgtgcttcataattgtgagctactttcaagatctcaattgttttgccactgctcattgcaccataacgaaaaaataattgcgccatgctggccctcccttttaacaaaaagtcttcgccttaatagtatagaggaaaaaataaatttgtgtaggtattaaacctcgttttcatcctcgctctatgctaaacttagacatagttttaaagtgagggatgtacatgagttttaaatcaggaattgctaaagttgccggtaaatcaagctattggtttttgcataatgcccttaagggcggcaccagttttccaggcaaattagcaatgaaaattgatccagaagttttaaattctttagccaaaggctatgaaactgttattgtcacgggaactaatggtaagacaatgactactgctttgattgttgaagctttaaagaaaaagtatggtgatgtgttaactaatccatctggttccaacatgcaacaaggaatcgtgaccgcttttttggctcacaagcacaagagagttaaaagaaaaatcgctgttctagaagttgatgaagcaaatgttaaaatggtaaccaaattacttcatcctagcgtctttgtattaaccaacattttccgtgatcagatggaccgttatggtgaaatctataccacttatgacaagatcgttaatggtattaaattagcacctgacgctacaattatcgctaacggagatgcaagcattttttcatcagttgaattgcctaataagaaaattttttatggctttaaacttcctgatgacaaacctgaaaatgacttcaaggctccagtcaataccgatggtgttctttgtccaaaatgcgaccacattttacattatcatgaacgtatttatgccaacttaggcgacttcttctgtcctaactgtggctaccaccgtcctgatttaacttttacagttaacaagattattgatcaaacacctaatagctcaacgttccaaatgggcaacaagcaatattccattaatattggtggtacttataacatttataatgccttagccgcctattctgttgcacgccactttggattaactgaagctgaagttgctcaagcttttgcagaaaataaacggatctttggtcgtcaagaattaattcactatggcgataaggatatcgatttaattctagttaaaaacccagttggtttggatgaagtcttgcacatgcttaatacagaaaaagatgattattcactagttgccttgcttaatgccaaccacgctgatggaattgatacttcttggatttgggatgctgattttgaaggattagacaaagaaaagattaaaaagatcctcgtcggtggtcaacgctggcatgatatgggctttagacttgaaattgctggctttgatccaggacaaatgagtactaatccagatgatgatagcctaattgaagaaattaaaaaactgccaactaagaaggtctatattctttcaacttatactgcaatgcttgcacttagaaagaagatggccgaaaagaaaatcattaaggctggtatgtaaatagaaaggattcccgcgggaatccttttttgtgtacaaaaaagctgtagctctaatgctacagcctttctaattattgggatattggggctcgaacccaaacatccaggaaccagaatcctgtgccttaccaatttggctatatcccagtaaatcacccgtacgagaattgaactcataactccaccttgagagggtagcgtcttaaccatttgaccaacgggcgaatcaacatttataattatgcttttttcttctatgcttgtcaagtaattttgactataataatgctaatggatggtgaaacatgatcgactttaataaaacacagcatttaattgaatcaatggtttttgaacgcgttgttccaggcgtcaattacacttttatcaaaaataagcaaatttttacatcaactactggttttgctagtatctacccagaagttactcagctgagcccttttgcagaatacgacctagctagtttgactaaggttttagcaacagaaaatgtcttgcttaagctttatgaccaaggcaaacttaactttactgagcccttgcagcaatttattcctgaatttaaagaccctcgtgtacgcctttatcacttgctaacccatactagtggcattcgtggctggatcccccaccgcgacaaactagatcatgatgccttactacaagcaattatcaatctgccagtaactgacgaatttgaacacaagatgcggtatgccgatacaaactttatcttacttggattagttattaaaaagatttttggcaaacctgtccaagaagtagtcacagagcaagtcctcaatcaaatgccgcttgaaaatactactttttcaccacaaaaggatgattgcgtgcctactgccctagttgatggccatgtcttgcaaggtattccacatgatcctaaagctagacaacttggaatagattgcggttctgctggcttattttccaatcttcaagacttagttaccttcgcccaaggttatttaggactaaaggatgttttaccttatagtcaaaagactgtcagccagctatttgataataaaaatccccaaggcataaaaccacgctcttggggatgggaccttcggtttgatccaaagcaaaattatccgatcattttgcacacgggttttactggtactttaattattcttgatcgcatcaaacgctctggtctaattttattgaccaatcgagtccatccgactggacacaacactgttttcttagctatgcgcgaaaaaattatccatagttttatcaacgaaaacgccaaaatataatttatagaaaaaagacggctgtgtgtcagtcgtctttttatctctcactaaatttcatcatccgtctagtattataacttattttaacgctaatgtactagtcaaatattatttttctgctttaaacattttccagtagctaattaaaatgattaatgccattaataaagtaaaataaaaggctgcctgactaccttgagctgtcgccagtgcataggacgctgcaccctttttcggccaaatcgacataattgctgctaagatagttgttcctacagaaccggctaattgctggctagtctgacaaactgcggttgcatcggcgcgcgatgctcctttttctaccttcaaagcttcagctagcgtgttagaaaatgacattctgtgtcctaacatcatgatgccataaataataatgatcatcatcacagtcaaatttaagccaaaaatagcaaataacaagcagctgatcgccattaagaagccacctaaataaagtggcaatttagctccttttttatcatataggctaccaaaatatggattgagtagccctgcaataatactacctggtagcaaaatcaaaccaccaactaaagatgtttgctttccgacaatttggatgtagttaggcaatacaaaactgataccaatattattaaattgcaataaaaagtaagctaacgcaccataaacaaacgctttttgcttaaatacggctagatctaacaatttcttggatgattttttagataatctaacaaataaccaaattaaaattgcagtcacaattaataaaatccacattaaaggattagcaaatccattactaatttgatttacgcctaatgtcaaagtaataaatgctatagctaaaacgataaatgatagccaatcaaaactatttttagtttgttcatgatacttaccgactacaaatagcccggcaacaaaaacaatgatcgcaaaaattgtaacaaaaccaaaaatccagcgccagttaagataaaaagtagtgataccgccaaatgctggtcctaaagtcggtgccatagctactactaagccggcgattcccatgtaaacgccccatttttcgcgaggcataacttcggttactaagttaaacatcaacggtgtacttaatcctgcacctagagctgaaatcagccgacctaacagtaaaataggaaaattaggtgctacagcactaattacgcttccaatcataaaaccaacgcaagcaacaataaacaattgccgcgcagtaaaacgttcattcaaatatgaagaacaaatcataataatcgcaatcgccaataaatatcctgttgtcgtccattgaattatatccaaaccgacaccaaattgcttcatcatcgtaggaaaagtgacgtttaaactagtttccgtcaaaattccgacaaatgacataaacgcagctgataatactgctaaaacatttttagtattctctttcacacaaaaatcctttccacaaaaaaagaaagagcaaaaaacctttgtttccaatgtcattaagttaagacattgacaaattatcgacttggacttttaagatcattcatttgtgatttatcgcatttgaatgatcttttttcatgccaaataaacccaaattttgtttagaaattaggctacacgatataaataatatacagctgatttgggtttgagatttcttttgtcttttcgtcctggtctgatcggaattgtgtaatgactaatttgaataagaatctttttaaagatttcagttgaagaagaaattatatacatagcctggatgacaaaacatgactgtttgaaattgatcgcatattgatacttgcagtttttttgtggtacatatgcttgagcatcaatttgactgactgcgttaaacataatcatgtgggcatagatctccatttcaataaatctatcctgcttggaatgaaactgtacgctacctaaagcatatttcaactttttgaatgaagtttcaatgccccagcgcaaatggtagatctctttgatcctttttaagggataatcggctctatttagattagttagaacaacttcccattcttctttgcctgatttaggatcattaattctaaatttacaggcacgaaattttattgtacataactctccaaagtcccagctgccatctttggtatttttagaccgatattttatatattgacggtaatgatggttaaccaaatgaacgttttctgtagccttatgggtttcataataataattagaggtagtcacccagcaagctatatccttatcacactcttgattaggcaactcagctacttccttaaatgcgccatatcccgttttagtacgtatgacataataacagttaggcaggcgattacaattttcaatcatgttaaagccggtataacctcgatccatagtaactatatatggtccgcaatttagctttttaagcatttgaatggcggctttacgttcatccatctttgacttaggctgaaagatgcagtcttgataagtattatttaacaggtcatagagtgcattaacatgaatttggcaatatggctttcctttatgattgagatttccaacgatattctctgatttaggattccagatttgattaaaatcagacccatcaatggcaaatatacgatatttatgatcaaataactggatattaaataaattctgattaaatacagttagaatatgcttaaaacatgcgggtgaaagctgacctttgcgttggacataagcggaagtactgactactttatcgttatttttaatagctttttggccaaaagctctaaacaactcactggtcaaatcttttccttgcatattaatagtagttttaatgactgtagctgcatctaaaaaccgcttcctagtgaaggcatgaggatcatcgataaaatcatgaatatgctttccagtatcattgataatttgatcaagacgatctaaaatatttctgtgaagggctttcataattaacaccagctttctggcaataattttgaaggtttaataatttaatcagagggcgaaaaggtaggttcttttcgcctttattttatgcaaaaaaagaaccaaatcataatgattcggttctacagagattagattcaatttgtcaatgtcttaacttaatgacattgcctttgtttcctactctttctttaattagcacagctaattatattaatacgcatactatcaaatatgctgagtatatctaatattaaagacgcttagctaagtcgtcgtgtaagttttcgtaacctggcttgttaagtaaaccaaacatgttacgcttgtaagcttcaacacctggttggttgaatgggttaataccgttcaagtaacctgaaatagcaattgctaattcgaagaagtaaatcatgtaacctaaagtatgtgcactttggtctggaatgttaacagtcataactggaacaccaccatcggtgtgagccaaaacaacaccttcataagcacgatcgtttacgtagttcaagctcttaccttccaagaagttaagttggtcaaggttcttttcatcgcctgggatcttaacatcatgacgtggattttcaacacggataacagtttcaaataaattacgtaaaccttcttggatgtattgaccaagtgagtgaaggtcagtagtgaagttagcgcttgatgggtaaatacctttttgatccttaccttctgattcacccattaattgcttgcaccattcaccgaacattcttaaacttggttcatagttttcaacaatttcagtagtgtaacccttacggtaaaggatgttacgaagtgctgcgtattggtatggagttgcctttgacaaatcagtatcagtgtagtcagcacgtgcgtctgcagcacccttcatcaattcgtcaatgtcagcacctgaagcagcgattggaagtaaaccaacagctgaaagaacactgtaacgaccaccaacatcatcaggaactacaaattcttcgtaaccttctgcatcagcttcagtctttaaagcacccttttgacggtcagtagttgcataaattctcttagcagcttcttccttaccatacttcttgattaacttgtccttgaagattctgaaggctactgatggttcagtagtagtacctgacttagaaattacgttaacactgaagtccttgtcgcctaaccattcaatcaagtcataaaggtatgagcctgaaagtgagttaccacagaagacaacagttggcataccgttcttttccttgccatagaaattgctgttcaagaattcaattgcagcttgggcaccaaggtaagaaccaccgataccaatacaaatcaaaacttctgaatctgattgaatcttcttggctgccttcttaatgcgggcaaattcatccttgtcatagtcaactggcaaattaagccaaccacggaaatcgttacctgcaccagttccatcgcgaagttcagtattagcagcgttaaccatagcttgcatttcgcttaattcattttcatgaacaaattgtgttagtttactactatcaaatttaattaaactcataaatctgcttcctaactaaataaaatatttttcacaaacctattttaacaatcttgatttataaataccagtacattataagcgcattcaggcttttttgacaattttaaaaatcacataacccaaaattgctccacaagtattgaagaaaacatcatcaatatcgctaacccccgtcaccagcaaaaactgcagagtctcaattcccactgaaaacagcatccccatcagtaccgtccttaaaaacgttgctctttttgaaaaaacaatggggaaaaaaatgccaaacggcacaaagcacaagacattgccaaaagaattataaaagaaatccaaatgactgggagcatagactaatttccaagtttccttcatgaataccaagttaatatcactcaatggcctagagaaattaaaatcaagctgccacggaaagtaggtatttctaaaagttgtcagcatcaaaactaagattatgtaaaaagaaaagacccaaacgctagcttcagacctaattgatcttctgcggcgcaccaaaagaagccaaattaagcgcaatacagcaaaaattaaaaaataaaatattgttttatccagcgctaataaggttaatttaactaatgcaaagtggttaatattagttgcatactgtttagctaaaaaactataaagtgggcccaaaaatagcatactttgcctctttccaaaatattcattatagattatacctattttcacggctggaaaatcttaaaaaaaagataactcttagcaaattattgttttaaaagaggtgaaccattaaaattaaaagatgttaaaggagcattatatggaaaaaaagaaaattatcagttttattcaaacacgaacgggctttttaacccttttagttgtttgtttctggctgaaatatatttttgcagcttattttgatttcaatttaggcttgagcgacccgtatcaacatttcattatgtggctcagccccgtagggtccgccatcattttaatcagcttcggtttttatattcctaaaccgctgatctcttacatcacaatgttaattttagactttgccaatacggcattgctttttgcaaatattatctactatcgtcaattttcggactttttaacaattaaaacgatgtctaacgttggtaaagtttcgcagggtctaggtaaaagtaccgttgcccttctgcatccaacagatattattatctggattgatttgatcgttattgttactttactgatcattcataaaatcaaaattgatcaaagatcttacggcttatccaccccatttgcgattacctcagtaggcgcatttgtcctaactcttaacatttttttggcagaaacctctcgtccgcgcttattgcgcaacacttttgatcgctcctatgtcgttaaataccttggtattgacacctttactgcttatgattgcttcaagagtgcgcaaaatgttcaagtcactaaaaatgccaacgctgcggacttgaaccagattttaacttttaccaaaaaacaaaatgctgctccatcttcctcatattttggtattgagaaaaaacgcaatgtgattatcatccacttagaaagtttccagcaatttttaattaatcttaaggttaatggcaaagaagtgacgccgttcctaaattcactttatcaaaataaacatacgctcagttttaacaacttctaccaccaagttggtctaggtagaaccagtgacgcggaaaacatgctagaaactagtacttacggtattcccgacggatctttattcacttctttaggttcggaaaacacctttcaagctgcaccgcaaattttgcgtcaagatggctatacttccgctgtctttcacggcaacgtcggtagtttttggaatcgaaatgatgtttataaaaatatgggctataattatttctttgataaaaattactatagctcccaaagtaaagatgcaagcggctatgggttaaaagataagctgctttttgccgaaagcgttaaatatttagagcagatgcagcagcctttctatgctaagttcattacggtaaccaaccacattccgtttaacttagataaagaagacaaggaccctaactttaagactacaaacactgccgaccaaactatcaacaattactttgaaactgcccactacctagatgaggcattgcgtgaatttttccactacttaaagtcttctggtctttacaaaaactcaatggtagtcatttatggtgatcactatgggttaagtaattctgaaaatgaaaccttagcaccaattattggtgaaagctctgacacgtggaatacttacaataatgttcaaatgcagcgtgttccattcatgattcatgccaataatttgaaaggaaaaattaatcatgaaattgctggtgaaattgatgtcttgccaacactgatgcatttgctcggtattaacaataaaaactatgtccaattcggtagcgacatgctttcgcctaaaagacaaaattggatcgtctttcgtaatgggaccattgtcagctccagatatatcatagttggtgctaaaggaatcaaaggtaccgtttatgaccgagttagcggtaaacaaatcattaattttactcctcaagagaaaaaagaaatctctgagctagcacaaaaggccaaggcatcattagactattctgacttattaaacaaccacaatttgttacgcttctacaccccaactggctttgtccctgctgatccaacccaatttgattattccgtcaattatcaaaaaatgatcgctatcagaaatgaattagctggcaattccacctcgctttatagcagacatcgcggtacaactactaatctttaccgtactgatgccgctgaactaaaagatagaaaacaagaaattacccaagttcctgacagcgttaaaaatattaaagagaatacgaaaaacaaaaatagttcagaaaataccaataactaaaaagaacgcacagacctttcaaaaaaactgtgcgttcttttttagtttttagctacaaactgttcatagcccttgtcataaaaggtcacggtgaatgtggaacctttacctggtgcggaaaatacttctactttgccaccatgttgcttaatcaaagaagaaacaatcgcaagtcccaagcctgattcgccagttcccattcgagcacgcgatggatcagccttgaaaaagcgttcaaaaatatacttagtctgattcttgctcatgccaataccattatccttaaccgataattgtgttccatgctctatccgtttacccgaaataataattttgccatcatgagtgaattgaatcgcattttgaactaagttaaccattacctgggtaaaacggtcacgatctgcataaataggcaactgatcaggtgcctctacaaccagctcatcgttggctttagttgcattttgttttaattgcgacttcaaatcatgcagaataattgtggcattaaagttagtcttaaccagcataatttgattatttcgaatcttttcatagtccaaattttcattgactaaccgaattaatcgtttagtttcgcgctgcattaacgcgattgacttcggtttagaatcctctgggatagcatcgtattgcaagccctctagaatgccattaattgttgtcaatggcgtccgcatttcatgagcagcatcagccatgaattggtctcgtcgctcttcttgagccttaacctcttcgttcgactgcttcaaagcctgcaccattttattgaaattctcagccaattgatcaatttcatcgctatctttatgctcaatttgcacattaaagttacctgatgcaactttttgcgtagcacgtgataatcgcttaattcgtttagttgaataataagaaataataaagctcagcaacaatccaaccgctacagtaattaacaatgcacgcaacaaattgcgtttagccattaaaatcggtcgctcaacatgctttactctcgatcctatccaaacaatgccaacaagatttttgccattcatccatggaaccaaaacccccgtgtaggcatccttagttgaactaatcggtgaattttcattatgattattttgaattctaatctcttgcccattttttaaagtagtaaaaacttcttgtgaaagctgaattctagcctttgttttgggataaatctgctcatttttatcattaaaaatacgtaaatgagcatcatcaccacgaagaacatattctaattgattcaagaagttattgctaagcaatgcagtcccattttggctatcagcttccgccaagtttcccaaagaattagcatagctttccatccgctggtagttttgcgtataagcttgattacgcgcataaccaatctctgagtaaccaataatcgagatagttgtcacaataatgagtaagaaactcaacatattttggtaaattaatttcattatttgacctgcgaatcatcaaacttgtaaccgacgccccaaacagtttggatcaccttggcaccaaccttctctaatttctgtcgaagctttttaatatgagcatcaacagttctttcttcaccataatactcatagccccaaactagttctagtaattggtcacgagaaaagacttgtttaggcttttgtgccattgtatacagcaaatcaaattcttttggtgtcaaacccattaccggctgattatcaaataaaacttctcgtctattttttgaaatcttcaaatgatcggtcgtaatctcatagtcttgattatcttcttgagtatgagctggttcttcttccatcatcacgcggcgatgcaaagccttaatgcgggcaatcaaagcaattgggctaaatggcttagtgacatactcatcagctccgatacctagccccaacacttgatctgattcactgccacgagcagtaagcataataattggcactgtcggcgaaattgcccgtacctctttagctacttgaatcccatctttttttggcaaattcaaatctaacgtaatcagatcatacttatccgcgttctttttaaacatatcgacggcttcgacaccatcaacagcaatgtcttgttgccaaccttcttttttgaaaaacattcccatcatttcagctacggaagtgtcatcttcgaccattaatattctcaaactcattatcaatccctaaatccttttgttctcttatgcttcacttgatcaggatcgacatagtcatgtggcaattcatgtcgtttagacaaaaatgttttcaaacttttttcggtataaacaattggcaataagataaataaataaaatgttaacagccaaatgagaaaatagcgatcccaattcaaatagtgaatgattactcctaacagtgcttgaataaacccaaacaggatacaataccagcttgcccgtttctgagcaaacttaaaactatcctggttaacttgcgcaagataagataaatagccataaattcggttgggccttttggctggcgtaatcagccaaatcaaccctaccgccaccataactaagccacaagcgacatagatcacgatttctcactcctaattctgataaatttaaacggttattcctcacctggtgcagacataactattctcattttaccagtgaaagtgaaattcttcatctcatttggaataattaaattagttcccatcttcaaatcatatgacttgccatcagcttctaattttccttcgcctttgataacggaaactaacaggtatggatgatcctttaagccggtcttccaagtaccatcaaggtcaatttgccacaaataaaagtgtggtgaaagtggtggttcaaccaatgtcttaatttctgcatcttgatcttggctagtcttaacatctaacttaggatcaacatggggaacagtggtcacatcaattgacttttgcgtatgaagctcacgctttttaccatccttgcccacacgatcgtagtcatacaagcggtaagttacatcacttgactgttgagttccaattactaagcatcccttagttaaagcatgaattgtacctgctggcacatagaagaaatcgcctgctttaaccggaacttttctgagcagcttatcccattcgcctttgtggatcatatcagctaattcttcacggctttttgcatgatgaccataaataatataagcacctggatcagcttgcattacataccaagactcagtcttaccagaatcattttctactttgcgagcataatcatcatccgggtgtacttgaactgataaattatcattagcatctaggaattttaccaataatggaaattccttggccttagggttgccaaacaattccggatgcttcaagtaaacatcccgcaatgacattcccttaagtggcccatctgttacagttgacgcgtcatccttgtaacctgaaataatccaagcttctccaacttttccttctggaatatcatagtgaaaaatatcatctaatttacgtccaccccaaatttttggcctaaagtatggggttaaaaataatggttccatttaaatcacctcaattaaagtataaactttaaggcagaataaatgaaacccttttcttagatatatgtatactatttgttttacatgtaaagctacttgttatacttacgaatacctgtagctaatctttgcatcccatccttgaccatcgtcaaaggacaagctagattaattcgaataaaatcatggccatttccacgataaacactaccagctgaaataatcagcccagtttcttggcgaatgaactctgctaattcctgtgaatcagtactgatcttttgcacatcgatccacatcaaatatgtcgcattgcccgaaatgatttgtacttcaggaatgtttttttcaataaaattctgcacatacgcaaaattttgctttaactgttttttcaaagcattaagccaatcatggccttgctcataagccgcaatcgttgctggaatcgccaataaattaggctcggctacttcatcactatttaaaccgcggttaaccatattgcgcaaattttcattaggaacaattgccgtagcagaatgaagagcagcaacattaaaagttttgcttggggacactagtgaaatcacactattttgtgcttcacctgttacagaaaaggctggcgtgtaatctggaccttgtctaaccaaatcaccatggatctcatccgatagtaatgttacatggtattggtgacaaagatccgcaattttttgtacttcttcactagtccaaacttttcctactggattatgtgggttacaaaaaatcatcaaagtcgttagcggctcagctaatttttgttccaagtctgcccagttgatcgaataacttttaccatcgaaagctaaatcactcgacaaaacatggcgcccattattcaaaatggaattataaaaaatattataaactggctcttgtactaaaacattatcaccaatatgtgaaatacggcgtacaattgatgaaatagcagggactactccagtagtaaaaatcatccaatttgtttgtggccgatgattatgttctgtttcataccaatcagcgacagcattaaaataatctgcttgtgggaactcataaccaaatgcacctaatgtcaatttttgttgcattgcctcgataatttcaggtgccgtcttaaagtccatatcggcaatccacattggtaattcatcagacttcacatcccactttactgaatcagtctttgacctatctggtgcattttcaaaatcatattgcatatatctcactaatcctttggtgtttggttcgtatcagaatgaacaatttttgtacctattttcggacaatcaagctcggttttagatggatctaccttatctggatcgataatcaaagtaccaatctcaggtaccgtaattttaccagaaattgggtttttaatactatcaatctttgtattaagctccacatctaaattagaaacatattcaaaagctaaatctgtatgaatcaaggaaccattcttaatctcaagctgatcaatgtagttcaagccctgatcactttcaattttacaattaattaacgtaatgttgttagtattccaagctaaatattcaccatcaataattgaatcgtaaatagtgacattattgcaattccaaaaagcatctttagagataaaagttgaattatgaacttcaatgttttctgcaccatcaaaaacataatttcccacaacggaaacgtgatcaagataaatattctggctatctttaccaaaataatcaccattaatttgagaattggtaatcttaatatcattacaagtccacattgtttcttctgcgttagcaaaatgaacattatctaaaataatatgaattgtccttctgaataatttaggtgcctgtaaagcactatttttaattgaaatattcttggtataccaaattccagaccgtgacatagtttcaaacgtggtattttcaactttcacattttcatcataccaaagtggatatttccatttaaaaattgaattctttaatctgatatttttagcttcttttaagggagattcaccactgccaaatgtaataccatcaaggattgcatcagttaatccataaagaattctttcacctgcaaaatatttatttttgtattccataattgtttccacctttttgttaatttaataatcattaattttaggacagtattcattatatgatttctttcatgcaatgtttaatacttatttttagtgataatgcataacaaaaatgcatagcagataaacgatttagcaaaacaaaaaaccgctctagaacaacatctagaacggttatctatggagatgaggggaattgaacccctgtccaaacgcatctcgtcactgacctctacgatcatagttatattacttgaacttcactagctcaaaacgccatataacagggctagaatgggctagctaacctgttaagactctttttaactattcaggtgaggtagttaaacgtaactcgctaaagttgatactcggtgtcagccacgagtaaaccgacaaggagcaacacatgcgcttaaattaagcagctaatgcgtaagaatttttgttatttgcagttatatttaactgtaacgtttttacgtagtcgtaacctacgaaccgcagtcaatgcgggtctacgcctgtcgaatcccaaaacatccccttgagatacttattcattatagcatagacacacattacatgcgataaaaatgcttaatcaatattagtcaaacgtaccacatcacgttcaatcatcaattcttcattagttgggataaccattcctgcaactttggaatctgtttttgtgattagtccttcactaacactttcattagcttcattatctacaacaacacccatatatgcgaaagcgtcaagaaccgcttttctcacaccagtatcatgttcaccaataccagcagtaaagataattgcatcaacgccgcccatttcggcaatataagcaccaacgtagcgaataatacgattaatgaaaatttttcttgctaacttagcccgttcgctatcactttcacgcacatcgcgcatatctggtgaaattcctgacaagcccaacaaaccagacttattattcatgatataaatcatttcatccatcgacttatgctctaccttcattagatgttgcacgagtgaaggatcgatatcaccggttctagtagccattgtaattccggcaattggactaaagcccattgaggtatcgtaagacttgccatccttaactgcagtaattgatgcgcctgatcccaagtgacagatgactaactttaagtcttttaaatctttacctagtaatttagcagcacgcggtgctgtatagcgaattgaagtaccatgagcaccatatttacgtacaccatatttttcataatattcataaggaagtgaatacaaataatgtactggatcaagattacggtgataagtagtatcaaaaaccgcaacttctggcacatttggtaaaacattcataaaagcttcaattccgcgagcctcagcaggattgtgaagcggagcataatctgacaattcgtagatcttaggcagattttccttagtaataatagtagaatccttaaagtactccccaccattaacaacacgatgtcctacaccgacaatttcagttagttcttcaacaacatggtatccttttaaaaacttgatcaataagctaactgcagcttcttgatctgggatttcagttttttcaacgtgcttagtaccatcagctaacttaatctcaaatgatgaatcttcaagacctacacgatcagccattcctttggcaagaaccttttcatctggtaatgagaataatttgtacttaaaagatgaactaccagagttaattgccaaaacttttttcataaaaattaattcctcttctttcaaaaaaataagtgctttatcaattaatgattaatctttgcataccactcgttaagtttaacattaaattgaattaaagcctcttctttttttaaggaaccaagtttggtaagcaaaacttcacttgctttggcctcatcaccgtgattttggaaaactaaaactgacttttgattaaacttgttcttaaacatatcatctggcaactctacaatcgccttcaaatagactttcttagttaaccatggcataaaatcagcgccaatcttgcctgacaaaatagacttaggaactaccaaaaaggcatagccgttaggctttaaattattaataatttgttcgattaacaacaaatgagcaaaagaatgacctttcttagcctgattttcaaaattcttggcattctcatcaactggataatagcctacaggtaaatcacttacaattgcatcagcgttaggacacatccaaggcattaaagcgtcttgatgatataactcaatgtcaatattattcagatgcgcagccacatctgtcaaacttaacatatcttcatcgttatcaatccctaccaattgataattatccttagaatgattgagtgccttaagttgagaaataattgaaaacaacaaattccctgtacccacggcaggatcaacgatttccatcttttgatcttttaataatttatgcatcaacattgctactactgtagcaattgcaggtggagtaggcatttggttaacatcaaagccatcatcattaactgcctttaaagttagaaaagtaaagacttgagccttttctttttggctaatttcgtcataatctattgcttgatacttttgacttaattcagccactgttttttcatccggtgcaccattttcaaccttaatcttgccactttctaagttatcaaaagtctctactaaggcttctgtaaatgaaacatttaatgccgtttgcaaagtttgcacacagtctaaaaactgattaaaaagtttttcaaaattttccatagcggtccctccataccttaattattttatagaaagggataaagaggtgcaaggaaagtcaatcatccgttaagcattcgataattaggcgattgttctccatgctagcatgataaatatcttgatacattttgataaacaaaagcgtggtcattaaaactaatacactacttagtaaggcactgccttttacgttatgcgtctttttctttggttttagcatttttcttttcctgttcctcatcaagctgaaaaactaaatctgatacacccttatttttctctgttaccctaataatgatgctatctttagtggttttaaaagcagccttttcaacgttaaataataacggcatatagcctttccctgcaccagatactttaagtacgttctttttatagtattcaattcggtaagtagttgcatcgcctttttgatctatgcacttaaaggaagcactattacttatagctaatttagttactggatacactgccttaattttgtcagcccgcataaaattttctagctgtacataagcataggctacttcattgacatgctgattttgattcaagtttgcttttttaacactcaacaataaattttgtaaaattagcagcaccatcatagtaataagaagcgaaaacattgcttcagctaacataaaacctttactctttgaccgcaaaagtttgtttagtcgttgcatcccaaacatgattatgtcctgccttttgataaattcgatcgtgaactgttacttgctccaggtcagttttagtcagtatatggtaagcataagcacgatctgtttttaattccatctcacgaccatttttctgattttcagctacagttatataaaagcaactaacagcaatcacagcaattataattgctataaagctctcaattactagaaatcctttaacttttatcattccgctactctcccccacagcatttgatatttcaggcttttttccattccgtagccactaaaagtcaccgtacctggtttagaataaccagttaggttgaatttaaaatgatccaagccagtaattttgatattttgatcaactggaatacttttgtgatattttccgccagagaataaaatttgattggatctagctagatatgatacgccaatagtaacctccttgatcgtactgtacctcgaagtttgatcaagtgccgtcgtaactcttttaacagtattatcaaaaatcagtttttcttgatatctttttaactgcaaactaccaatcaacaaaatgccacagcaaacaccaagtgtaattattacttctagtagggaaaagccggctaatttatttcttttcaacaacttcgccactgtctaacgtgaaattctttttagctttagtaatttgatcaccagttaagtaatcgtccttttttagatcttcaaaatctttaggttcaccatatttatccttatataactcaacttgcgtttgcacagtagtcctaaatgcatccgcagttttagtttcagcattcttcttttgattaatcaaattaggcacaattagcaaaatcaaaatcacgataatggcaattaccacaaccatttcaatcaaagtaaaaccctcttgcttgcggcgcttagccataatgtttgctaaatacttcttcatcttctctttcatttttaacttaatcctcttcttcactctattttttacttttatctttaacgtcactttttctatagtccttgcatcattgaatacattggtaataacagcttcaaatacattccaataatgcataagccaattaaaataaaacaagctggttgaacattgacgactaatttctcaattttttcagttaaatccaaaaataggctacgtcctaataacaaacagcgcttactcaagctctttcgctcagagccagtctgcaataaaactaataaactattaggcaaaaaatcctctgcattaataatttcttctaaattttttccttcagctaaatcgtgccctatcttttgtcccagtgcttgctgcaatgaacctttctcttgatctgccgcatattcgcacattcgctgcaatgaaaagccactagctagcagcagtccaatgtcataaaccaacaaataatgaatatacagcataactacctgcccaattaacggatatttactcagttttttcattgatgaataatcctgtttattgagcaaagtaacgatcttagcaaaaaaatataagcccagcaatacaataatgatcagaccaatcatgaccatatctcctgaatgatcactgctatcgctgaattgtgtcgaaataaacgattgcataaagaccagtaaaatcaccatcattatcgctaaaaccaacggataagataattcagcccgcagttttttcatctgctcctgttttagtcgattcaacgttgctaaatgctgcaaacattcaactaggtttccttgctgtaaagccaaattaacctgagttactgtcgttttagaaaagcctagtttaagcagttcagtactaaaacttgctccttctttcatgcgactagccattctttccatcaactgacgcctttttggccacaatgccggcattaattcaattgaattgagcaaagaaaaaccattatctaaactatgttttaaataatccaaaaaggccaattgttcttcgccatttaacttatcctttttggaattgccaatatacttcatgattaatttctcctcctttccacaaacgctctagattttcctgccaattaacgaattcaccacgaaccgatttgcctagctctttttttaacaaagaatctgccgcaatatccatcaagcactttaattttccttgactgactaataatcgctgatacgacactgcagttagacaatttgtcagttcgtcacacctaatacctaatccctctagtcgagaaatagtttgcaaagtacttttagcatgaactgtcgcaaaaaccaggtgtccacttaaagctgcatcaactgctaaacgtgctgttccttgatcacgaatttctccaataattaaaatatctggacgatgccgtaatgccgcctttaacaggttttggtaatcaattcccgcttcgttattgacttgtgcttgcaaaaaagaagactcatgaatttcaacaggatcctcgattgtcatcactactttgttttggctcattttcttagcaatttcatacattgtcgttgtcttgcccgagccagttggaccactagtaataatcaatccgcgactcttagccagcttttcaattgttcccagctgctctggaataaaatattgactatggtcaatcccatagatgactcgaataaccagtgactcttgatcggaaaaatctcctaagctagataaacgcaagaaatattcatgtccttcattctcatatgtcattgcgccaacctgcgggcgacgatgttctgcaatatccatctgagcactgtacttaaaaaaattgataatttcctttcccgtctccaaagtaaaacctgcatattcaattagacccttaccggtccgaaatttaaccatcaagttttcttttttcgggaaaaagaaaatatcacttgctttaactttaattgcctcaattaataattcactgacaatttctttgatcttcataaaaatcctccttttttgcctcacattatttattacgcaaaaaaagtcgatttttttgtgagaaattgaaaaaaacacaaaaaattttctcaactctaaaaaacgttgatctaacagcatttcaagattaaaaaatcattaaaaagtacacaaaaaaatagcttagccattggctaagctatttcatcattaactaattaatcttcatcagccgctgcagtataaacattttgaacatcgtcactatcttcaagagcatcaactaaatgttcaaattgttccttcttatctgctggaactggagtggtgttttgtggaatcatagttaattcagcatctgctagtttgtaaccatccttaattaaggcgtcacgtacacctgcaaattgctttggatcagtgtagatttcgtatgcatcatcactagtttgaagatcgtcaccaccagcatccataacatcaagtaatacttgatcttcatcagcatcagtagttgaacgatcaattacaatgtagcctttacggtcaaacatgtaagcaactgaaccagtagcaccaagtgaaccaccgttacgagtgaaagcaacacgaacgtctgaagctgtacggttcttgttatcagtcaaagcttcaacaaagactgcaacaccacctggagcgtaaccttcgtaagtaatttcgtcgtagtgttcttctgaaccaccttcggccttcttgatggcacgcttgatgttatccttaggcatgttgtttgaacgtgccttatcaattaccatacgtaatgtaggattcccatcaggatcaggaccaccactctttgcagccatataaatttcacgagataacttttggaaaattttacctctctttgcgtcttgcgcattcttgcggccttgaatattgtgccattttgaatgtcctgacataaggatccttctttcttttttctaatattaattaacgttattatcttaactcacagtactttaaaattcaatggtgtcaaccatttaaacttgttttttctggtcaaaaaatctgtgtttaataaacaatactagcattatcagcaaaattgccgttaaagcccctgctccatcaagcattacatcgtgcacgctcggtgttctatcacctgttaaaaattgatgatattcatcaaacgcagcaaatgcaattgccataaaccaagttaaaactggtgctacccatttgattttgaaaattcttcttaatcctaaatagccaaaaccacctagtaaaaagtaagaaccaaagtgagccattttgcgtaaaacaaattgagtcagccctgctcgaccatcaacttgcacattatgaatacgaccgccgtaagtaaaattccagccagcaacgatattctctaaccagccaaaataacggttaattttattgtcatgaatttcctgctgctgataagtcattgaactagaaatgaacaatgcaactagcaccaataaagcaagcagtaaaaagattttttctcgtttagtaaaatgaaatttatccattgctatttcttctctcttttttacttcttactttaacaaaaaaacgggttaaacttgacccgttttataaattatttaactttgcttaatgcttcatcaattggtgtgtccccatcatgcataataattacttgatgaatcgtattatcatactttaggctatcaaccaatacctgagcaacatcatcaatcgaattttctccaccttctggagtaaatgatgtcttacccgttgctggcttctccattaagttacctggttgaatgatcgtataatccaaattagtattatgaattaaccattcatcggaaaagtacttagcaatatcataatcaataatgcttgcaagagaaggaatttctgcccacttgtcttggtcaagcgcaaaggcggagcttagttgaacgtaacgcttaacgccattagcttcagcagccttcatcagcttaactgcgccatttaagtcagtttgcaataagtcctttccacgagaacctgctacaaaaatcactgcatctgggtgacctaattcttcggtcagcttattaagcgaatcatgaaaatccaaatgttgaacagtcacatgttctggatcgacgacttctacagcattttcacgtctagctgcagcaattacatcgtatccttcatcaactaatcttttaatgacagccttaccaacacgacctgttgcacctgctacaagtacttgcataatcaattcctcctattcattgtgaagtttaccaactagccttcttaacacctggaagttgaccttgatgagccaattctctcatgcattctctgcataaaccaaacttccgataaactgaatgtggtcgcccgcagcgttcacaacgggtgtactctctagttgaatattttgctttttgcttattacgaataatttgtgatgtttttgccatattaaacctctatctacgtctttctattctttgaggcgccggcttcttatctctagttaacaatctcaacgccaaaataataattccaattgccattacttgtccagtcatacgtttttcttcctttcaatttgctttattagtctcttacttttcgtcagtgattattatatcacttacatttaataagttaaacatttttatcaaaaaaatagaaagcgtttaacactaatcatcaacacatataatagttagaatctatttagatactttcacaatgaggagaaaaaatgaacgaaaagtgtaaaaacaaatcgccagccttcttattcttttaagagagtaaaagtttttaaagagaaggatgagaattaattggacgatttaatttcaacaaataaaatgaagaccatcacttggcctgttttgaccctaatggctttatgtacagttatcggtttagacgatatcatgtacaactttcaaaaccaagggatgcctgttatcacctcttggattatcatgtgtttactttatgtcacaccttattcactaatggtagggcaactaggttctacttttgataaagaaggcggcggactttcttcatgggtacgtggtactgacggtgaattcttaggttacttcacggcttggacttattgggctgcttccattccttatgcagttgactctgccaatgaaattatcgttgacttgggttgggctgtaactggaactaaagacttccaagataagatcccaacttcattgtttgcaattttaacctttgtagtatttattgtctttatcattgtcgaacaccacttttctaactcaatggaatttctttccacgattggtggtggattgatgattatcatggttatcttattcgtgattttagccttcttcggcttggttaaatctggtggccatatggcaaccaaaaactttggcttccattcaattgtgcctaacttcaacttacactactggtcaacagttggtatgttgatttacgccatgaatggttgtgaattggttgcaccatacgtaaccaagatgaaaaaacctaaaactgattttcctaaggccatgattgctttagccgtaatgactgccttcttgactatcttaggttcatttgccttaggtacttacttcgacgctaaccatattcctaatgacttgaagatgaatggtgcttactacctcttcgatatgttaggaaaacaattcggcatgggacacttcttactttacttctgggcttggacatcactgttcttcaattgtgctttggttgcagtcttgcttgacgcgatgaccagaatgttgatttcagacactggtgacaagtacatgcctaagtttttgcgtaaaaaggataagaatggcttgccagttaacggctatatcttaactgttgctctttcatcattcattatgatcttgggtattttcctacctgatatgaatgatatttttaactggttattgaaccttaactcaattatttcaccaggtgtaacctgctggatcttctactcatttatgcgaattagaaagaattccaagaagtttccatcacaatatgtttatattaaaaacgataagttagcttggcttgtcggtttactattactattagtcactgctgctgcaactatccttggctttgcaccacaagatgttaagcagggaactggcttatggtggtatgaattaatcattaatatcgttgccgtagttgtcttaattggtttgggtgctatcttaccaggtattagacgtcgtgaagttgaatacggtgttgcttttgataaagctcaatggatttggatgggaatcttgattatcggttcaatcatcttagatatttggttaggtagcacaaaattaccgatgagaattgctttgattgttatcgaagcagttgttgctttgattttgacttggttagttggtagaagaaagccagctaatgctacgaaataataaattattctattcaaaaaggaaggcacgcaccttcctttttcttatacatattttttcaaaaattcacttacacgacgttgatattctctagggtatgtctcaaaagaacgagcatgttttgcctttttagcaatccacaactgttttggccctttagctgccttgtagtttgcataaaccattttcgtcggcacaaacggatctttcccaccatgaataaacaacattggcttattatttttctcgacagaattaaccgccgaagcatcccctaaataaaagcctagatttgctttagcaataacactcaatccattcacaaaaaattgaccaactggaccgggcaaatgataaatatccttagcttcatgcaaaaattcatccttaacactagtatagccacaatcttcaatataagccttaacctggctcggcatcttaataccacttgccatcatcgtcgtggctccacccatgctgacaccgaagatgacaatcttctgctttttgccttcctcagcaatcaactttctcacccatttacgcacatcatacttttcaggccaaccatagccaatatattttccctgactttgcccatgtgcacgcgcgtctggcatcaacacgttataacccatttgatggaacattgctgcatacggtcccatcgtatccttgttattggtaaagccgtgcaacaaaacaaccgccttatcagaatttttcttcggaatataatttgcatctagccgataatcaccagtattagacttaatataccatctctgttttttagcatcttcataccagcgcttcttctccgctaacggatcttttttatttttactcgagtatttattcaaaacagcttttttaccaggcacaaaggccacattgaaaaaatatgcttctcctactccaatgaacgcaactaatacagcaacgataattccaatcgtcacccaaaatttccttctgtgttttctattcaaaatgtcaactcctatataaaacagatagaattaattatacgcttttaaattttatatggtatattgacatttttatcaaaatattgctcagccctgtacacaaaacttctaattttagaataaaaagatgatgagatctgctgtctcatcatctttttaactagtatagctttaatctaaatctgcaccatttgaagcaataactttcttgtaccagtagtaagaatcctttggcattctatctaaagtacctttaccttcatcatcacgatcaacatagataaaaccgtaacgcttagacatttgaccggtaccagctgatacttcatcaatacagccccaagtagtgtaggcacggacatcaacgccatcttcgatcgcacgattcattgccttaatgtgcattctaaggtaatcaatgcggtaatcgtcatgaatcttaccatcatcactaatcttatcaacggcacctagaccattttcaactaccatcattgggatttcgtaacggtcatacataacttcaaggtagtattgcaagccatctggatcagttgcccaaccccattctgaatacttaaggtatggattcttagcaccagcggcgaagttaccgccaaccttatcttttacttcatgagttgtgataacgttgctcatgtagtaagaaaaggtgtacatatcaactttaccttccaacatatccttcttatcttgctcagtaatgtctaagtgaacattgtgttctttccaaagacgcttagcaaatgttggatacttacccttgcattgtgcatccccacagtagaaaatattttgttcccacatatggcggttagccaaaatatcctttggatctgggattaatgtgtaatcaacgatcccacaaatcatattccctaccacataatcaggatcaatttcatgagccaacttaactgcacgagcactggctacaaattgataatgcaatttttgatatgcatgttggtaaactttatcatcagtcacattgttaccaaaggcactgagcatcagtaaagttgagttgatttcgttaaaggttaaccagtactttactaaccccttgtattcttcaaacaaagttttagcatatttaacatacatatcgatcatttcacggtcgccccagtcgtggtatttttcactgaggtaaagtggatcttcatagtgagaaatcgtaactaaaggttcaatatcatattttttacattcttcaaatactctacgatagaaatcaagtccagcttgatttggcttttcctcatcacccttagggaagatccgagtccaagcaattgataaacggaaggttttgaaacccatgtccgcaaacatcttaatatcatctttgtaatggtgataaaaatcaatcgctacatggttaggataatattcattaggatcaattgcaccaactgccccttcaggaagtcccgcacctggaactcctggtgttttttctaacttaccatttaacttgtaagtcaacattctaggtgcatctaagctacctgcagtagtaatatctgttactgataggcctttaccatcttcatcatatgcaccttcgatttggttagcggcagttgctccgccccataaaaagttctttggaaatgacattatgattctccttttctgaaagcatttacattaattatagactaattggtttgaacttgaccagttgttttaacttctgcggtactgccttgcaaagacaaaatttcttgaccaactttaacttcaccttgagctacttgctgtacagattcatatttcttagaattcgtaacaacaactggagtagtcacttcatagccagcagccttaatttctttaatattaaatttaaccaatggatcacctgctttaacctcttgacctttttctactaaagtcttgaagcccttaccttgcagattaacggtatccattccaatgtgcattaatacttctgcgccatctgtagtgttaagtccgacagcgtgtcctgttgggaaaactaaagcaatcttaccatcagctggggcatgaagcacaccttcgcttggttcaatagcaacgccttcccccattgcaccgcttgagaatacttcatctttaatttctgataatggttttacttcaccgtttaatggtgaaactaatttggttgaaggattttccttttcttcacttaaaattgcttgtacaggagcactcttagtaatattagctgcttcattagcggcgtcagcaactttttgtgcttgttttttattatattcagcatcaactgattttttaccaaagagcatttgaagtgcaaaaccagctataaatgctacaataccggcaataattacgccgacaattgttgtcattgatcctcccttaggattaatgtaggccggaattgcaaagaatcccattgatggcataatgtacaatactgaatgaaaggcaccaatgattgcacctgagactgcaccagcaatacagcttaaaacaaatggcgtttttcttggtaatgtaataccataaattgctggttcagtaacaccgaacagtcctgagaaaaatgcaccagtagctgtttctttaagttttttgtccttagtttgacggataatagctaaaacaacaccaatttgcgcataacaaaccatgcaggataaacctagaattgggtcataacctaatgcggctaaatctgcagtagttacggcaacgattccccagtgaacaccgaaaataacaagtacttgccaaagagcacccattaataaaccagcaataattggactaaagttgtaaacacctgacatcactgcaccaattgcgtccccaacccaagtcattacaggaccaattactataaatgcaactggtaaagcaataatcatagtgacaactggaaccaagaacatttgcacaactgatggaatccactttttagcccagtgctcaataattgaagcaaaccaaacggtaaataatactggtaaaactgtagaagtataattcatcgtgataaccggaatgccaaagaaagtcgtgtgaatctctgaggcaaaagccgttcctttaaacaatgtacctagaacagtcttacttgcagctaattgaaccatagttggataagttaaggttgcaccaattgctaatccgataaattgattcatgtgaaatctacgtgctgcagttacccctaagaatactggtaagaagtagaaaatactatcaccaattgcatatagaatttggtaagtacccgatttagtagaaagccatcccattgcgcctactaaaactactaggcctttaataataccgccagcactaagtggagctagaatatctgtaaaaatgcctgaaatcaaagcaacggctttatccacaaagctagaattatcttcaacgtcatcatcaggaacttgtccaccgccattaaagccgccttctttgacaacagcatcgtaaacatcagcaacttcattaccaatgaccacttgatactgaccaccagctttaacaacagttacaacaccatctgtatcttttaaaacatcatcgttagcctttttttcatcctttaatttaaaacgcaaacgagttgcacagtgaacaacactggtcacattatctttgccaccaacattttgaatgatggtcttggctaattcatcatagttcttagccatttgcctttcctccttaaaataaaaacccaagctactcaaaaactaaagaacataaatgttcaacgtctttcagtaactcgggttcatgcctaatcttcttagtaacatacctaagtaacttagatatttaattatcttgacgactagttacgcgccaaatatgtaaaacaagataaaattcatcatctgaatctaaatcccatcccatttttgcatgtaagtaagtggtgatccgctccgccgtctcatacgctttgctatatttgattttcataaaacctagcattgcaggatcaagtgaagcctcctccttttgcttatttcgtaaaaatctaactaacaaaatgcgcaaatgcgaaacaaacctactatagttaaaggagctcgtatcaagttgcattgaatattgcaattgaataatatcgattatcccacgaatcaaatttgtaatctgaattgtttcttgtacttgagaaacatcactcttagcattaaccaggtgataggtcatcaaaaccgactcactctgcggcaatttaatctgcatctcctgattaattagattgaccacttttttagctgccgcaaattcttttggaaaaagattttgaacttcccaactattgttagcgggagctatatcaatatgatctttaattcgcgtaactgcaaaatcaatgtgatctgctaaagcaagatactgaaagtcattgaacttaatctgaagcagaggttcgaccagctgaagtaccttattagttacttcaattgttttagggtcaaagcccttaacttgatccacttcgtctttagtaacgaagcgacgttcaattttgctttcatcaacaggatcacttttttttagaccaaatcctacgcccttgcctaggactatttcttcttgaccttggttattttcaattaaggcagcactattattaaatgttttaagaaatttcataataattcaccaccttagcaaaaaaagaaaaagctatcacaaataatgatataccaacgcaacattatttgtaatagctaagacctgatcgtatcagtaatccgctcacttacagttattataatagccaatattgtaagcggtgtcaatataattttgtgaaaaaaagcaaaatattttacaatgaactaaaaagcgaggtaattaaaatgaaattcgttcttgcacctgattcatttaaagaaagcatgacagcaaaagaagtctgcattgcaatgaaaaatggtattcaaaaagttattcccaatgcacaaataattgcggtaccaatggccgatgggggcgaaggtacaactgattcactcgttgatgctacaaacggtcgaaaataccaaataaatgttaccggtccgcttaatcaaaaagtatcagcttattatggcatctcaggtgatggacaaactgcaatcatcgaaatggcacaagctagtggtctctcctatgttgcaaaaagtaaacgaactcccgaaacaattttaaagactacaacttatggaaccggcgaattaattaacgcagctttgaagcacaacgtcaaaaagattattatcggccttggtggtagcagtactaatgatggcggtgctggtatggcacaagcgcttggtgttaaattttttgatcaaaatcatcatgaaatcacccaaaagttagcaggcggtgctttagatcaaattgctaatattgatctttcttcaattaatcctcgtattaaagataccaaatttttattagccagtgacgtaaccaatcctctaactggacctaatggtgcaagtagcgtcttcggcccacaaaaaggcgcagatgatacaactgttaaaattctagatcaaaatttatctcactatgcacaagtaattgagcagactattgataaaaacgtcgcccaaatttctggtagtggtgctgctggcggcctaggcgctggcctgatcgcctttactaacgccagtattcatccaggcgtgcaattaattgcccaagaaactaagcttgaagccaagatcaaagacgctgactatgtttttaccggcgaaggcggaactgattttcaaactaagtttggtaaaacaccctttggtgttgctaaaattgctaaaaaatatcacattcctgttatttctttagcaggctatttagatcaaggtattgatcaactctatgatgaaggatttaccgctatatttggcattcttgctaaagcagaagatattgagcaagccctaaaagatggaccaataaatgttacccgtacaactgaaaatattgttcgtttaatcgcacaaaaataagatgagctcgatgcccatcttattttatttcgttaatttcttaattaagccttcacagccacgataaatttcattatacgctgtttcaaaatcatttgtataccaaggatcatcgacatcagcataagagccagcaaactctaaaattttatgttctttatgctctgggtctccaccagtaatgcgattcatatctgcgaaattttcttcatccatgcagattaaatattcataattatcatagtctgagcgagtcatttgactagcacgatgaccacgatcatatggaatatgttttgcaactaattcccgttgtgcacgagcatcaatcccatgacctaaagcatcctgcgtagttgctttagattcagcagtatattgatctgctaggttattttcttttaacaaatattgcatcacggcctctgccattggtgagcggcaaatattgccatgacaaacaaacagaatttttttcattaccttttcttcctcttagttagtctatttataaccggccaaataatcgccgtaataactccaactgttaagccaacccaaatctcctgcgacaaagttacaagaatgccactataaactcgactttgcaatgcggtcatcgcctcatttgaggcaagccacaatgccacaaatgaagcaatagtagctagtgctagtggaattgacgccgaagagcgaccaaataaaatcaaaattgcggctaacaaaaataacaaagccactgcaaaaattgaatactcataaattgtaataatatggttcacatcttctgaatcttccttcaatttatgattaatttgcttgactaaatattcattgataatttcttccaacttacttttactagttaagcctaaatctttagtggtcaattttccctgatcattatatttttcacacaatctatatagatcagcatatgataagttaacttgatatttcggcggcaattgttctaacaatgtcttttccaaaccagatgcttcgagtaactcaacccctgccttcaaattaggattatctgagtcatccactactcgattgattacttctttgcccatcgcctgtgtatcgtttatttttaaattcacattgctagtcattaataaccaaaaagatactgcggctaggccgaccattatcaaacgtagtattattttgacgatgttcttcatctaaaaatcttcccctaacatctacttttttcagatggcaaacaattgcaaggcaccatgtcaggagcatccttttctttcaatttaagttcttgctgcatcgtcttaatatcgcccttagaaagcggtgcttcttttagcaactgaattaatacctcacccttgtgcatatcacacatgttttgcatcatatgtaaagtaacttcagacatcattttgcgctgactaatagtcggcttataaacaaaacaccggccttctttacgcgtctttagcaagcccttttgcactaaacgccgcattagcgttttaattgtggaatcggaccaatcctttttaccttgtagttctttgattacttggccagtacgaacttctcctaaggtccaaataatacgcataacttcccattctgattgggtaatggaattacgatcgtctttagtttctgccataaaacatcacttctaaatccaaattttttactaaagaacaaattttttcaaagcctttgcaatcccgttgtgatcattatcatcagtaacataatcagccttatctttgatctcactaatggcgttacccatcgctactttcatgaagttgggattagaaaacatcgaaagatcattgccttgatcaccaaaaatcatcacgtctttttgggcaatttttagccgtgaagccaaatccattaaagcattaccttttgaagctcccaaggcatttaattcaataatactgtcaaaactgcgaacaatgtcataagtctgaaaagcccagtcggggaaactattccacagtttttctacctggtcagctccttcagttgaagtaaaaccgactttgttaaaagtaaaatcttttggaatttcttttcggtctctaactttcataatattatcggtcaaagccgcattaatttgcatttgcacagataaatcccgatcagttgtaatgaaatacttagtcgtctcaaaatgtacatttacatgacttaaacgctgaaaacgcaacatattattgaagtcttgataattcaattcctgactcattaaaacacgaccagaaattgtttgaattactgcaccattaaagacgattgcatattgatcatcaccttcaattcctaattgcttagcaaagttcaatactcctgataatggtcgtccagtagctaaaacaaccttaatcccattttgtactgcgacacgcaacattctttgcgtttctggcaaaatagtattattgcttgataataaagttccatctaaatcaaccgcgatcaatttaatagccattttaatccctcggatcttaaaaattacatctagcatacgcgtggtgctagttaaatctttctagacaataagccaaattataagctaaaattgcaatttccaaccggctttgaaagcctatcagactacgtgctcgattgttctcggcattgtaataggtcagaagcgaaaagtcgctttcaattgttctgcgaatagccatcaattgatgatcattgtgctttttagctcctgtcatatttttacgatatggtgtccaaagttcataacccatttgttttagctgttgatgcagttctttgcctaaatagccttcgtcgccaagaagatagtaattagatggatgtgcattttccatcagttcaactgtctccttggcatcatgaactgatgcttttgttacgacataatcaagaatgtaaccgtcatcgctaacaatggcatgaactttgaaaccatagaagtaaattttcttggtggccttataaccaatgttggcataaccgcgaaaaattttagcacgatagttgcgaattggttggcaaacaggtaccggaaagctgtcaatgatcaagaaatgtccattcaggtcaacctttttattcatttcttgccgtatctgataaatcaattgcaatagctgacgtgaacgccgattaaaacgtgagtgtgataaacaattgaaacattcacagaatcttctttgtgattcaattcctgtcttagcttgccagataagtaaagccaaaatcagactgtccgtagttttaatttgatcaatatttcgccgatgagtaaactcagccggtgcatacaaacgataccagtgccgacaaattatcactaaatctttaaaactaacttgtaaatggtggctaaaacgcttaagcttaaggcagttcaatcagatcagactcttttctattattactatttacaagtcgagtctaacaagattggacttttttattaactaaaacgatttaactagcaccacgcgtatctagcattaattatacaaaaagccgtgatttaactcacgactttttacttatcgattattcaattaggattttacttacccatttccttttcgaccactttaacgatacggtctacataggcatcagtttcttcttgagttggtccttcagccattactctaagcaagtcttgagtacctgatggacgaacaagtacacgaccatttccagccatatccttttccactgcagcaatttcatcaagaattggttggtgttctttccagctcttcttgtcagcaaccggaacattaactaggcattgtgggtaatctttaaagtctttcaaaagttcacttaatgacttaccagtcttcttcattacgagcattaaatgcaaaccggttaacataccatcaccagtattatgataatcactcataataacgtgacctgattgttcgccacctagattgtagccgtgagcacgcatttcttcagaaacgtaacggtcaccaacttgggtacgaacattcttcaagccttctttttcaagagccttagtaaaaccaagattactcattacagtagtaacaatggtatctttcttcaaacgaccatgttctgccaagtatgagccgagtacgtacatgatgtggtcaccatcaacttcattaccattttcatcaacagcaatgcaacggtcagcatccccatcaaaggctaaaccaagttgagcaccttgcttaacaacttcttcttgtaacttttcagtatgcgttgcaccaacatgatcgttaatgttcaaaccatctgggtgagttgcaatagtagtaaagtcaacgccacaatcagcaaacagtcttgagatcaatgcgcttgaagcaccgttagctccatcaataactaccttaattccacccaagtcttctggaatagtattttcaataaattgcaagtatttagctgaaccttcgtggaagtcagttacagtacctaatcccttagcagatggacgaggtaatttatcttccttagcgtcaattaatttttcaatttcgccttccatttcatctgaaagcttcaaaccatcgctaccaaagaacttaatcccattatcttctacagggttgtgtgaagctgaaatttgcacccctgcatcggcgccttgtgctcgtactaagtatgaaagacctggagtagtaattacgccaacctcaagcacttcaatcccaactgaaagaaggcctgaaatcaaggcatattcaagcatttggcctgaaatacgagtatcacgagatactaataccttagcttgttcgccgtcttttttgttcttagttaaaacataaccaccatcacgacctaatttaaaagccatttctggagttaagccttgattagctacgccacgaacaccatcagttccgaaatattttaacatttaataaacaacctttctcaaattaattattcgcattctttactttaattgatatctgtacattttcaggatcaacgcgagcaactcccttaggtaaaactaaagggtaattctttacagttgaatatgagattcctttcagatctacatcaacatccaactgcttaatctttgctaatgtttccttttgtccatacagtgttacctcatcattcttggcagtaaccgaatagactttattatttttttcatttttaggctttaaatttagcttaactttctttttgaaaagcgatattggcaaactagcttttactgtagatggattaatcactgcatttaattgacgcccttttttatcttcagctatcaaaataacttgacgctcataatcatgattaatgccattaggtaaaggcaacttggcaacgatctgatcaatctgatttacttcgcttctagcaccagtaacctcaacttgctgcggatcaacactagccgtaccaatattatatccattagcaacagcatttttattatactctatttgaacgggcatggtacgagattttcgccgttcaatatcaacattaactgttgccgggttaatcgtgtaagataattgactatttagtcccgtaacttctacctttacggtttgcttacctattttcttatgagttagatcaatataagcacggaagctttgagtattaacagtcgaagtaaccaacgcattcgaaccctccaaagttatcttaaccttttcaggataaccaacaacatagtatttatctgtattaaccgaaacttgcagaggaacactaattgtctgcgtttcattagcagtttgccgtgtcttcttagattcaccctgtgtaacaaaacctgtttgagtagagtcaatgtaaaccactaataagatcgcaaacagcaatgagattattctgattacccagcgtttatcccaaaagtctttcatcgatctgcaccccatttccagactttattaatcacacgacgaatccatggaaccttcttctcttccttaggaacaagttgagcattcaaatacttcaaatattcttcacgagacaaatctactaaaaagcgcccgtttctagtaatagttacgccaccagtttcctctgagacgacgatcgttaccgcatcggtaacttcagaaataccaacggcagctctgtgacgcgtgcctaaacgcttaggaatcatgctgttatctgacagtggtaaatatgctgctgcaacagcaattcgattattattgataattaccgcaccatcgtgcaacggcgtattagggataaaaatattaattaataattcaccagaaatatccgcatccagcttgattccagtttcaatataatcatctagccccgtatcttgttgaatcgtgattaaggcaccaattcttcttttagacatgtattgaatcgctttatcgagctcctgcaccatcttaaccgactgtgtatgagcactctcacctcggccattaaaaatcggcgtgcgtcctagccgctctagtccacgacgaatttccggctggaaaataacgataattccgattactgcccaagaaacaatttggtccacaatataagttaccgcatgcagttgcagtaagccggcaataattctaacaataaagataaagacgatcccttttgccagttgtactgctttggtaccacgaatcatcatgatcaaacggtaaactaaataccaaatgattaaaatatctaaagcaatggagaaattattccaagtaaacagattagaaatattaaaatgcattgattgctcctttcttctttaattataaccgccccaatttaccgtgcatacattttaaattctaaaaataggtcattatattcttgggtcttcttaggacctaaatctctaaagacctgtagattcttcaacgtactttgagtaggataaaactgccggtcatctctaacttttttcggcaataatttttgggctgcggtatttggggttgcatatccaacatattccgcattttgcgctgcatttttaggttcaagcataaaattaataaacttaagtgcagcttttttattttgtacagttttaggaataacaaaattatcaaaccacaaatttgatccttgcttaggcacaacataatgcaagtgaggattttgttccatcatttcataagcctcaccagaccaggtaacgccaattgctgcctcattttgcactaggtacatcttcatttcatctgaaataatcgccttaatattgggtcccagactattaagcttagtttgtgccaaatgtagtttaatactagatgtggtattcattgaatatcctaaagaaaccaatgccatccccattgcatccctagctgaatcaactagtaaaatttgcctgcgatactttttactccacaggtcattccaagtcttaattgcccctggcttgacgaatttatcattataaacaattcctagtgtcccccagaaatatggcacagaataatcattattttgatcaaatgacttatgtaaaaaactcttgccaatatatttcaaattaggaatttgcttttgatccaactgatcaagcaaatgagccttgcgcattttagttaccatatactcagaaggaatggtcaaatcatatgccgttccgccttgtttgattttggtatacatcgcttcattggaatcaaaggtctcatagacaacatgataacctgtctgcttttcaaacttttttattaactttggatctagatagtcgccccagttatagataatcaagttttgtttatttttcccggtagacgatttctccaaatgatgggataaaccccaaaggcctgcacaggcaattaaaatagctgcaattgccatcataatctttttcatttaactaggcctcccatcacacgatgatttttctttctgccctttttagtagtaataaaataatagattcctacaagcaacaagacaaaaatgaacattacggtacttaaagcattaatctcaagatcgattccttgtcgtgcccgagaataaatttcaactgaaagagttgaaaaaccattcccagtaacgaaaaaagttacggcaaaatcatctagtgaataggtcaacgccataaataaaccggaaaagatgcctggcataataactggaattaaaacatcactaaaaacctgccatgaattcgcccctaaatcacgtgctgcatcaataagcgacatatccatttcattaagtcgcggcaagaccatcaaaaccacaatcggaatagaaaaggcaatatgacttaacaatacagaaccaaaatttaagccaattcccaatgctgtaaaaaagatcaaaaaactagcaccaataattacatcaggtgacaccatcaagacattgtttaatgctaaggttgttttcttattagattcttttttcatcgcagcaattgcaattgcaccaaatgtcccaataattgttgctattaaactggacaacagcgctagtaggatagtttccaaaaatatcgctaataagcgattatcttgaaataaagtctgataatgagcccatgtaaagtgctcaaatttattcatgtttttaccactagaaaatgaaaagtaaatcaaataaaaaatgggtacatataataggatcaaagtaaaagcaagatagatcttagcgattaaatgtctgtttctcataaatctaccttctttcttctagcctttttgctagtaatcaacatgactaccaccatcagcgcgattaaaattactccaattgtggcccccatattccagttcattgtggtcataaaatactcttcgatagcagtccctaatgtgattacccgattgccgccgatcagccttgttaacataaataatgacaatgatgggataaagatggcctgaacgccgctttcaactcctggacgagaaagcggccataaaacatagcgaaaagtttgccatttactagcacccaaatcctcagaggcatgaatgactgcaggattaatctctttaatcgcattaaaaattggcaaaatcataaacggaatttcaatgtaagtcgccacaaaaataaaagcaaaatcagtaaacaaaatatttacgggaccaataccaaataaatgtaaaaatttatttactaaaccgtcattacctaaaatgccaataaatgcatatgctttaagcagcaaattaatccatgttggcaaaatgatcaataacagccacagctgctggtttttcattttaattaaaaaatacgctgccggatacgaaattaccaacgtcaacaaggtgatcaaaaatgcataccaaaatgagttaagcatcatttttaaaaaggtaccatttttaaaaaattcaacgtaatttctgagcgtgaatgcgttattactatcagtaaacgaataccagagaatcaataaaatcggcaaaatgacaaagagaataatccacagcagatatggaatcataaaaaacatctttttatttttcattttcatctgcctcatacttttctagtcgagcatcaaaatcgtgttggctttcatttaaccgcatgacgtgaatatcttctggatcaaaaaagagcccaacacgttgtcccaatttaactccattagtagaatggatcagccattcattttcattggcatcaattgccttaatctcaaagtgatcacctaaaaataattgcgtctgtgctgtaaccacaatcttcccatcttctggtttaacaatatccaagtcttcgggacgaataactacttcaaccttttcattaggcttcatcccaccatcggcacatttaaatttattattagcaaattccacttcgtaatcatgaatcattcgaccagataaaatattggagtcaccaataaaacgtgctacaaagtcattcactggctcatcgtaaattgctaccggattaccactttgttgaatctgcccatcatttaaaacaaaaatttcatcactcattgatagagcttcttcttgatcgtgcgtaacaaaaataaaggtaatgcctagctttttctgaattgcccgtaattcaaattgcatgtcttttcgtaaacgtttatccaaagcagatagcgactcatctaatagtaaaaccttaggttcattaacaattgcccgggcaatagctacacgctgctgctgtcctccactaagttccgaaatttcgcggttagcgtaaccgtctagacgaaccatatgcaaagcatctttaacagctggcttgatttcactcattggtcttttcttaattttcaagccaaacgccacattttgaaaaacatccaggtgtggaaacaaagcataattttgaaaaactgtattgatatgtctttttgaagcatcaaggtcagtaatatcattaccatcaaagaggacttgaccactagatggctgagtaaagccagcaataattcgcaaaattgtcgattttcccgagccactaggaccaagtagtgaataaaatttaccagattcaatagttaaatttatatcttttaatgctacaaacccatcatcatattttttggtgatgtgttttagtttgataatatccatttccatccctcacataaaaaacagctgcaagccttccagcctgtagcttgtctttgctaaaatattttacttttctttgccgataatcctaacttctgtgcgtaagtcaatgtcaaacttttctttaattaccttttggatcaaatgaattaaattcaaataatctgttgcagtagcaccgcctttattcacgataaaacctgcatgtttcattgaatcttgagcgccaccgatttgtttaccttgtaaaccagctttaataatcatcggaccaacaaagtgcccagtaggccgcttaaagacactgccacaagatggatattcaagtggctgcttataacgacgtaaagcatttaaataatgcatatgatctaagatctctaacttatcgcctgacttgagtgcaaaagtggcgcttaatacaatatcgccattttcttgaactaatgaatgccggtaagaaaagttcatttctgcgtttgaatatgttttaaattctcctgctctggttaaaacattaacgctttgcactacttcttgcatctcaccgccataggcaccagcattcataaaaataccaccgccaatactaccaggaattccagcagcaaattccattccgctcaaaccatgatgagcagccgcaaaagctgtatcgataatccgtgcaccagcatcagctgtaacttgattatcttctactttaatctcttttaattcagtcaaaataattactaacccatcaattccgccgtcacggatgattaaatttgaggcattgccaataattgttaatggaatttcattttcacgtgtgacttttactaattgttctacttcatcagtcgtcttaggaaaggccaaatattcagctggtccacctgtcttagtaaaagtatatctgcttaatgggatttgctctttaatatcaatccctttttctttcaaatcaagtaattccacgctgttgcctccttaaagtttcttgttttattttaccgcataaaggcgttagcttcattaatattaatgatatacttttttaaaaggagaattttatgaattttattgcaatggactttgaaacagccaaccattatccagaaagtgcctgttcacttgctttggtaatggtgagaaataataaaattgttgatcgcttttatacagtaattaatcctcaaatgccatttgacgcgcgaaatattcaagtacatcaaattacagctgaggacgttaaaaacgctccaacaatggcagaggtctggccccacattaaagaattgtatcaaccaggaatgcttgtagccgcacataacgctcgctttgatactaatgtcatgcggcaaagcctggcacgttacggtattgaggagccccactatttggtcattgacactttagctagcagtaaattactcgaaccagaactgcctgaccacaaattagacacagtttctgaggccttaaacgttgaattgtggcaccaccataacgcattaagtgatagtgaagcatgtgctgggattttaatcaagcaagaagagcaatttggtgatgaagcaatcaaaaatttggtttatcagatatgaaaaatctctaggaattttgatcctagagatttttgctttacttattaaattcagttaacgcagctttgacccattcttcattgcgcttaccatgaggagtaaattcaacaacccgtttagttgaatcccaactatcgtccactctggtaatcgtaagttgcaaatactcatctggcaaatcattcattactagttgtggccattcaattaccactaaacctggttctgctaaatagccctccaaatcaatcgaggataaatcatcattttccaaacgataaaagtccatatgaaagagcggcaacttagcttctcgatattcacgcacaatggtgaatgtaggactcttaacaggccgatgtatgcctaatgctcgccctaatccttgagtcatggttgtcttgcctgcacccaaatcaccatttaatagtaataaatcgtagggctgggccgttttggctagggatgcacctaatttctgcattccatcagcagaattaatttctaactttgtcattacttttcatcctttgctaaagcttgtgcggcagtaacaattgctaaatcataaatatcttgttcactgcagcctcgagataggtcattcactggagctgctaaaccttgcaaaattggaccaacagcagtgaagccacctaatctttgaaccatcttataaccgatattgcctgattgtaattctgggaaaacaaagacattcgcatgtccagctacctttgagtttggagccttcttttcactaactgcaggtacaaaagcggcatcaaattgcaattcaccatcagctggaatttctggatgatccttttggaacatagctgctgcatcatgtaccttatcaaccattggtccttcggctgaacccttagttgaaaagctcaaaaatgcgaccttaggatcaatttcggccatcttggcagtcagagcagattgatagccaatttcagctaaagtttcttcatcaggattaatgttgatggcacagtcggcaaaaatgtaacgctcatcgcccttttccattacgaaagcgccggatactcgatgcatccccttagctgcatgaattaattgtaaagctggcaaaacagtgttagccgttgagtgagcagcaccggaaaccataccgtctgcttttcccatcttcaccaacatggtactaaagtaattaccttgggctaacttgagctttgcttcagcaatactggtatcttttcgtctagctttaacaaattccgctgccatttgatcaagttcatcataatgattgaggtcatagatcttaacaccagctaagtctaaattattttctttaactaacttagcaatctcatctggatttccaattaaaattggttcgataatgccatcttttttcaaattagctatggcagtaagaattcttaaatcatcgccttctggaaaaacaattcttttcttatcttttgctgcttcaacttgttttttgaataatgaaaatacgctcattttttacctcttatgctaaatcagatttacttatcgtttctggcaattgccagtcaatcggcgtttcatcaaagttcttcaatgccatattacaccgcgaaaacggtcgcgagccaaagaaccctcgatcagccgaaaatggacttggatgtgatgatttaatgataaaattcttactttgatcaattaatggaatcttgttttgagcaaatcgaccccacaaaataaagacgacttttccacgctcactcagagccttaattgcagtatcagtcacatcttcccaacctttgccttggtgaccgttagcatgcccatacggtaccgtcaaaaccgcattcagcaaaagcacaccttgatcggcccacttttttaagtaaccgtgattaacaggccgagctccgacatcatcatagagttccttatagatatttttaagtgatggcggcaaagttgtacctggcatgacggaaaaactcattccattagcttgaccaggattatgatatggatcttgacccaaaattaccactttagttttagcaaacggtgttaatttaaaagccgtaaaaatatgatacatatcaggataaatttgtttagtagaatattcttcttttaaaaaattatgcaattcgtgatatttctcacttgcaaaaacaggatccaatacttgatcccaatcgttgccaattaattctttagccaagtcttacaccctcttttcttctcctctttatggtatcattaatttaatactaaatgggagagaaattatgatcaaattagttgcttgtgatcttgacggcacgttgtttaattcagagatggctgtttctgctgctaatgcaaaagctgtgaaaaatgcacaaagtagcggcattgaatttttaattgcgactggccgggccccacgcgaatcacgttcagttctcaaagatgctgatttgcataccagttttatcaatcttaatggtgccctggtttttgacgaaaatgagcaattaatgatcaaacacagtattcccaaggcaaaagcacaacagctagtgcatttactacatcgatcaggcttttactttgaaattttaactgccaatcaggtttatagtgaaaatctagatcaacgtatttcaaatgtagctcatttaatggtagatctaaatcctctacttgattttcgtcaagctgtagcaatttctgctggtaataagactattatgaatatgaaacaaatccacagtttcgataatttattgcaagatcctaaaatagaagtaatgaaaattattgcttttgactctcggggacatgaagcttttaccgatatcaaaaaagaaatcgctacaatgggcgatctagtagtaacttcaagttcatcttctaatattgaaatcaatgagcaacatgctcaaaaaggtcttgccttacttgattatgccaagttaaaaggtatcgagcctgaggaaatcgctgcaatcggtgataatttaaatgatgagagtatgatccgagcagcaggtactggcgttgcgatgggtaatgcgattccagctattaagaaaatagctcaggtagtcaccaagcgaaacaatgaagatggagtagcttatattttaaataaatttattgcagataataacaatatttaaagttatgaggtgagtaagtatgcgattttggctagaacttaatcaggaaaaggattacggtcaaattcctgtgcttaatcaaaatggaaaagctgaattttttattcaaggcaatcttgataatccaaaccacactttatatctaaataatttccgtaaacaggaagtgggacgtctgttttctgatggtgcgggcctaattgcttcgttcacaattgatgtcgtcaaccactctttagtaggcgtaaaaaagttaaacacacctactgcaaacatattctatttgacccaattaaagtatattgttacaggtagtattaaacgtggtacttatacttttcgttctggaatcaagagtgtagcaagtgtccaaacaatcatgggagatcgcggaggcgttttaatttgtgatattactaagcctgaagacgtcccctttattcttttgacatccgttctatttacacaatggcatgttacgcctttgaaactgcctagttttccgccaattggatttgaggtaaatccaaattaaacaaaaaagcagtcatgaaaattttcataactgctcttctagaaagtgatatagatatagatgtatcttctgccataaagtttatatttattaagtaataaggaattattaggcagagactgaataatgaaagttaaatctaatttgattcaacctccatagcttattatacttcgttcagccaaaaatacaagggctagatgttattattttactttaaagatagctaaataatgcatttagagctagcttatagcttaataatttgttatttaacttagtacatctatttttctaaacaagacaactttaatttctacgtaaattgcaataataaattgaacacttttaatcaagctgcttgatagattagatctaattctctttcaaagatttcatctggtgtatgatatgccaatatctttcttggtaaagagttgcaccaggtttcaatgtctatgatgtcttgtagtgaataattgtctattgcctctcccttaggaataaatctgcgaatgagtccattatgtctttcaacggttcccttgtcacaagatgtataaggatgagcatagtaaactaaagtatttgatacgtcttctaagcttgaaagatctgcaaactctgagccattatcagtggtaatggttttaaaaatatcattccaatgttcgctgtattgcctttggagttctttaaaggcctgcatgacactgacagaagtcttgtcaggaatacgaagaattaagaactcacgactcatacgttcagataaggttagcagcacctcatcatctttgctcttatgtccgagaactaaatcgcattcccaatggccaaactcattacgtttattgatttctttaggacgttcttcaatgcttctgccaagttttttcttatttctgcgaatacgatgaagcttggtattgcgtttaagcttctctggcaagtcgtaattatgtatatctaatagaccttggtcgacataattgtaaagagtcttagtacagacaacatctctgctgctaaatgcgccaacagcggtggcgcgattactgcacacatcaagcgaccagccgtctttaaagaaatgtttgtggacatagcgcatgaattgagttttcctgagaaagtctgatttacgtccacaatttttacgatgagcttgatatgcatcatgcccttgagtagccttatatcttttgactttgccatgatacagttctacagtaccgcgcttaacctcataactgatagtagaaggggaacagtttaattcacgggcaatggcacgcaaagaatagccatctttcaaacgcaattgaataataactctttcctcgaatgataaatgcttgcctttaatgtgatgattcatggtagaatgtaaagagtccattttgacctcgtttctaaatgttgtgtggtaactacattctatcaaacaggtccgaatggactttttattttttattaagtgttcaatttaattttacaatcagcgactttaatttctattaaaaaatatagtgaaatgatcaagtgatttatcaatggcttgatcatttttatttactttatcaacgaacttgtttttagctatcaaactatataaaaaagagccaaatctaatgatttgaccctaaaaattctagattattaatctaaattattttttatgaattagtcttggtagtttaccaattctaagaatgattctggtactaatgaagcaccaccaaccaagccaccgtcaatatcaggcttagccattaattccttaacgttagctggttttacagaaccaccgtattgaatacgaacgttttctgcagtttcttcgttgtacaagtccttaacagtttcacgaatagtcttgcacatttcttcagcttgatctgatgaagcagtcttaccagtaccgatagcccagattggttcgtaggcaataacaagtgaagatacttgttcagcagttaagccgtctaaagcagccttaatttgagcaactacccagtcttcttgcttgttagcttcacgagtttcaagtgattcaccacagcaaatgattggcttcaagccattagcaaagattgccttagccttcttgttaatgtcttcgtcagtttcgtggaagtaaccacgacgttctgagtgaccaataattacgtagtccatacccatttctttcaagaccttaggtgaagtttcaccagtgtaagcaccttcgtcttcaaagtaacagttttctgcaccgatatgtaagtttgagccttcagcagcttttctcaaagcgtcaaggtcaactgcaggtgcacaaataagtgattcaaccttacttgggtctggtaacttatccttaacagcgttaacgaattcagtagtttgttctggattcatatgtaacttccagttaccagcaataattggtgtacgactcattaatctattgtcctttccttactattacttgtctgaaacgcaagcgatacctggcaattccttaccttcaaggtagttaagtgaagcaccaccaccggtagaaatgtgggtaatcttaggagcaatgcctaattgcttagcagcagcagttgagtcaccaccaccgatgatagtagttgcatccttaaggtctgccaatgcacgaccaacttccaaagtaccttcagcgaagttaggcatttcgaatgcacccattgggccgttccaaacaacagtcttagcatccttcaagatttccttgaacttttcaacagtcttaggaccgatgtcaagacccatcattttgtcaggaatatcatcaccaacaacttcacgtgaagcatcatttgagaattcagttgcggctacgttatctacaggaagaacgatcttgtcgccagccttagcaagtaattccttagcaaggtctaccttgtcagcttcaaataatgatttaccaatgctgtggccttgagctgctaagaatgtgtaagccataccaccaccgattaaaatatggtctgacttaggaattaagttttcgataacaccaatcttgtctgaaaccttagcaccaccaagaatagttacgaatgggtgtactgggttttcaacagcatcacctaagaacttgatttccttttcaagcaagtaaccagctgctgcaggcttgccagcttccttcatagcagttgcgataccaacgtttgaagcgtgacttctgtgagcagtaccaaatgcatcatttacaaacatgtcgccaagacttgcccagtattcgccaagcttaggatcgttacctgattcacgcttaccaaagtcgttgtcgatgtcttggaatctagtgttttcaagaacgataacatctccatccttcatgttgttgatagcgtcttcaacttctttaccttcgtttgatggtacaaaagttacaggcttcttaagaagttcacttaaacgttcagcaactggctttaatgataattccttcttgtcagcatctgacttaacacgacctaagtggctaagtaagatagccttgccaccgtgttcaatgatgtacttaatagttggaagtgcagcaacgatacggttgtcgtcaccaataacgccatccttaattggaacgttaaagtctacacgtactaagacctttttgcctttaacatcaagatcgtcaacgattaatttagccattataatcctccgattattttgatattttttcttcaaaaaaaggcggaaggaagaatctccctccgccttctcaattaccacttaactatataatcagttaattaaaattaatgattaaagagttgcaaagtgtaataaagtacgtaccatttggcaagtgaatgagtattcgttgtcgtaccaagcaacagtcttaactaattgcttgtcacctgcagtggttaccatagtttgagttgggtcaaagattgaaccagcagtcatgttaagaacatcgctagaaacaatgtggtcaccgttgtaagcaaatgatgggctttcgtacttcttcatagcttcgttaacttcgtcagcagtaaccttcttgctcaagattgataccaattcagtttctgaaccatctggaactggaacacgttgtgcgtgaccgttcatcttaccgttcaagttaggcaataccaagccgatagccttagctgaaccagtagtatgaggaatgatgttttcagcagcagcacgagcgtcttgttccttaccactacgtgaaggaccatccaaagtcatttgagtaccagtgtatgcgtggatagtagtcatagtagcaacttcgataccgaattccttgtccaaagcgttagccattggtgcaagtgagttagtagtacatgaagcagctgaaacaatcttgtcatcagcagtcaaagtgtcttcgtttactgagtaaacgatagtcttcaagtcgttaccagctggagctgagatcaatacacgcttagcacctgcatcgatgtgagcttgtgacttagccttgctagtgtagaaaccagtacattcaagaacgaagtcaacaccatcgttcttaacccatggaatgttttgtgcttgtggttctgcgtatacgtggtaactcttaccgtcaactacgattgaatcttcagttgatgaaacttcgtggttgaaagtaccatgagtagtgtcgtacttaagcaagtaagcaagcattgctggagtagtcaagtcgttgatagcaacaacttcaatgtcctttgacttttcgccaaggtccataatacgacggaatgctaaacgaccgatacggccgaaaccgttaataccaattttaactgtcataacctaaagtcctccttaaaaactataaacaacatttattttaaacgggatttcatttcccctttaaaatcatatttgaggcgccctcatcagtgattagccaggtttgatgaggcgcattaggcatataagctttaattgcttgagcctttcgggcaccacaagcaaaagcaaatatgtggggtattttgtataggttctcgaactgcaatccaacctgggtgatgcggtcaacaaccttgccatgttcatcgaagaaacacccgaaacattcggtgacggctctcttctcacgaagttcagatagcttaattgaattatagcctctgcgctgtgccatttcttgagctaacccaataccatgaatcacagcatcactttgagaaatgtcttgcagaacatctgcgatcgaggactcacgaatcaaagatttgtaagcatcatctgaaacctgctcaggtaaatataatgtcttataagtacctgaagtcttagcagccatttcttggacgattgtattactttgcgtctctacattttcgcccaaagctcctcgacctggaacaaattccaactggcgattgttagctaaatctggtgataaatacttagcagatctagctaacgccgctccacctagaattgtaactattgaatggcctaaaggcaagagtaaattcaaagctgaacttaatttttctcccatctcctcatatactcggtcttggaaatccgcattaccagggacgatcaatgttctttcaatccctaattttttggctaatgctacttccgtttcaccggcattaaagaggcgatcaagcaatggtcctgcatcttttaatgttttctcacccttttcagttaaaaacatcccaaaactttttgtttcaatcaatcctaattgacataagtactcagtctcagttctgatgtttctctctgaaagccctaaatgctgagcaacactccggcgtccaattggcgcatgtagcgaaatctgctcaaggacaagatacctttgtcgaagaatctttaagacgtcgggaacgagcgcttcgagcaaagaaaagtccgaatccatcgttccctcctttccatgggacatctatcgaccacctacgtgtcgttttgtgtcccagaatgcttaaaaatataagagaaacgtacttttcattcaattcatacatttcccaatcgacactgttagtataacaatgtatttttcgtaattcaagaaaaagatacacgattttaaaaaagtcgtaaatcgagtaaaatcatttttatttcattactttttttgatatactaccacttgtgaatcatctgggtccttagtgtaatggatcgcacataagattccggttcttagaatctgggttcgactcccagggggcccatataactacatgttgaagactaccgccatctcggtattcttcttttttataccaaaaaagcattcctcacggaatgcctttttcaatatcacaattatttagtgcttgtagtcatcaactcagcacgttgtgctaactcagtgtacaaagttgagcctgaaacagataaaccttcaatttcacggcgagtgttgaaatgatggctaccattataagtaccatttgctgctacacggaagatgtagtcgttaaaaccaatatagaattgattgtggttgctgtcataagcaaaaccttgaactggtgaaccagttacgaaattactttgagtagcaccgatttcttctggagcccaagtgtcaccatttctagttaacttccagtattcatattggtgacgaccaccattgtggaacaatgcatacatagtgttgtcgccaacaaaggttgcattatggaagtaacgaggatatgcactgctgccgttccaggtcttaacagtccagattttgttaatcttcatatcactctttcttacttgcataatttcttctgaagctgttgaattagcagtcttattgttattagccaaaacataaatgtagcttgaagaagagccaagtgattgaccatgacctagcttaatgtatggtgaaactttaatattgtttgcgtagcttctaaaagtgctccatcccatagtagttaagttttgagcagcatatttactcttaattgcattcaagttgcaagaaacaagatgtcctcttgagtcgctactgctagtgtacatagaagctgtaaaaataccatcattaacagtaataccttcaggaattaccccaacttgtcccattgcatcagcagcttgaccatagcctaagctgacaaaacgtggttggaacaaacgagtgcgcaaagtcatgccgttacctgaatagctatttgagctagtttctgaacgataaccgtgtgcctgattccaatttcttgatgatccctttgagccaccattccaagtatgaactgccttaggaccactcttaacagaagcacctgcactagtaattccttcatttgtatctgaacgaacagttacattaacgcttgcctttgccttaccatatgaataatctaccttagtagtgccggcacggcttgaactaacagagctatgtgaaacattaaccctatctggattaattgcagtaccttgtccatctgttgcatagttaattgcatccctagttggaaaactgtagttgctgttgtgaactaagctaacatcttgagctactgaaatttggtttctagcaaaaaagttttgacttacccaacccacattgcgtccatcgacaataatgtaccagaagttacctttcttggtagaaacatacttcttagattggatttgactatgcttaaagtacttggtatttgaaaatgcacctgatggtccttttttagatacattatgataaatagcgtaattaccattgccagcaatcttagtaactgccttgctgtagcttttggcatctaccttgctttgactaatggcaaaaacaccaccaactaatgcagcactggccacaaaagttaataacatctttttcccttttaacatcttattaatcctcccatatgaaaaaatcacgttcattttagcacaaatttatcaaatgaaacatctaattattaaaaaatttcctgaacaacaagactttgaaaacgcttctgttatataattaaaaagttcacataaatatataaatagtaatagggagaaattttatggtcgaatcacaaaataattccaaaaagatgatgtggaccaccctagcaatgatggccttctctaccgtgtggggctttggtaacgttgttaatgggtacgtctactttgacgggacaaaggttgtctttagctggatcgtcatgttccttctctactttgttccttatgccttaatggttggtgaacttggagctaccttcaagaatgctgaaggtggggtttcctcttgggtaaatgccactatgggcgcaaaatgggcctactacgcaggttggacctactgggcttgccacgttgtttatatttccagtaaaggtactggtggtttaagagcgatggcctggggtatcttcggaaatacaaaatggtatgatggcttacctaccgcttggacacaatttgctacattagtagtcttcttgcttttctgttgggttgcaagtcgtggtattccagtattgaaaggcctagcaacaattgctggttcttcaatgtttatcatgtcaatcttattcatcattatgatgtttgccgcaccagctattaatccttctgctggtttccacagtattgactttaactggaagaatttgatgccaaccttcaacgtaaaatactttacttctctttcaatcctagtatttgccgttggtggttgtgaaaagatctccccttatgttaataaggttaaggatccttccaaaaacttccctaaggctatgatggctttagcaatcatggttatggtatctgctattttaggtacttttgccatggcattaatgtttgaccctaaggtggttaatgccaaccttaacgaatacatctctaatggtgcctacatggcatttgacaagctgggcgaatattaccatgttggcggcttgttcatgtacatctattcatggtgtaacgtaatcggtcaattctcaacattagtaatcagtattgatgcaccacttagaatgcttttgggtagtaaagaagctaaagaatttattccaaagggcttattaaaactcaacaagcatggtgcttacatcaacggtatctggatggttgttgtcctctctggtggcttaattgctattcaagctttagtaccaaatgctcaagctgttatggcacaattagttaaattaaattcaactactatgccacttcgttacctttgggtatttgcggcatatgttgctttaagaaaacagcagcaaaagttcaacactacttatcaaatgactaaacatcaaggcttagcctatactgccggtatttggtgttttgtagttactgctgcatgttgtatcttgggtatttactcaccagatccatttaccttattccttaatatcttgacgccaatcgtcttgattgcattaggtttaattttgccaggaattaagaaatatcaagaagcaaaggcaaaataaaatttaaatacagaattttaaaaaggaagcaatttcaaaagactgcttcctttttagcaatgtcattaagttaagacattgacaaattatcgacttggacttttaagatcattcatttgtgatttatcgcatttgaatgatcttttttcatgccaaataaacccaaattttgtttagaaattaggctacacgatataaataatatacagctgatttgggtttgagatttcttttgtcttttcgtcctggtctgatcggaattgtgtaatgactaatttgaataagaatctttttaaagatttcagttgaagaagaaattatatacatagcctggatgacaaaacatgactgtttgaaattgatcgcatattgatacttgcagtttttttgtggtacatatgcttgagcatcaatttgactgactgcgttaaacataatcatgtgggcatagatctccatttcaataaatctatcctgcttggaatgaaactgtacgctacctaaagcatatttcaactttttgaatgaagtttcaatgccccagcgcaaatggtagatctctttgatcctttttaagggataatcggctctatttagattagttagaacaacttcccattcttctttgcctgatttaggatcattaattctaaatttacaggcacgaaattttattgtacataactctccaaagtcccagctgccatctttggtatttttagaccgatattttatatattgacggtaatgatggttaaccaaatgaacgttttctgtagccttatgggtttcataataataattagaggtagtcacccagcaagctatatccttatcacactcttgattaggcaactcagctacttccttaaatgcgccatatcccgttttagtacgtatgacataataacagttaggcaggcgattacaattttcaatcatgttaaagccggtataacctcgatccatagtaactatatatggtccgcaatttagctttttaagcatttgaatggcggctttacgttcatccatctttgacttaggctgaaagatgcagtcttgataagtattatttaacaggtcatagagtgcattaacatgaatttggcaatatggctttcctttatgattgagatttccaacgatattctctgatttaggattccagatttgattaaaatcagacccatcaatggcaaatatacgatatttatgatcaaataactggatattaaataaattctgattaaatacagttagaatatgcttaaaacatgcgggtgaaagctgacctttgcgttggacataagcggaagtactgactactttatcgttatttttaatagctttttggccaaaagctctaaacaactcactggtcaaatcttttccttgcatattaatagtagttttaatgactgtagctgcatctaaaaaccgcttcctagtgaaggcatgaggatcatcgataaaatcatgaatatgctttccagtatcattgataatttgatcaagacgatctaaaatatttctgtgaagggctttcataattaacaccagctttctggcaataattttgaaggtttaataatttaatcagagggcgaaaaggtaggttcttttcgcctttattttatgcaaaaaaagaaccaaatcataatgattcggttctacagagattagattcaatttgtcaatgtcttaacttaatgacattgtcctttttagtgtatatttttatttattagcccaagcatttaccaatgccttgtacttggcaacgctaattcctgcacctttactgcttcctaaatatgaatcagcatttccataaccagtattgcttacattggcaaagcccattactctataatttctgttaatcaaattcaaatagtgtcctgccattttatagccgttcgtgccctctacggccgcatcataagttgccgtccaagttggactatacttcgccggcttcaacgaatgattcttttttacatcataattccaacttttcttttcagagaaccaagtatcaaccggatctaaacccacactttgagtagcgatgttttccaaaccaatcgacttgaaataatgagtatgctttaagccaccacgtttttgatagtcagcatttaacattgaggctgctgtcaaaagtggtgacacctttaatgaccgaaccccttcacttctacgtgctctattgacactattcaaataaggcaatacagctttaatattcttagcactagttgcatcatcatttgaatgcaagtcaacgtattcattgtaccaacttgccttaggctttttacctaagcgacctgttttcaataatttcactgctgatctagcggaactcctttgccctttagtcaaagatttgtttttagatagatatgtcataaaatcaacggcatttttggctgccttaactggcttggaattcaatgcagttaatgacaaggtcaccatcacagcagaagcacctgcaattaaaaatcgtttcttcattctttttctcccatattaatatatgtgaactacgatttaattgtagcacatacactaatggaagattttccttttaaattgcattattattcatctttaccattccgctttttaatctgacgattaattttttgaatatctttttcttgcgtcaatctaatcacaatccaaattatgatatatacaaaaatgaagatacctaaagtttgccaatctataagccaatgattaaaaagcatcataatagaaaacaacgtaaatgtaccaattaaatgtaacaacaacgcaactaaatatgacaggttagtataaaaaagaaaactcaattccccaatcaaaccactacaaatgaaaacaacaattacgctcattaatgggatattaattgcacctacactatttgatactattcctaaaataagcaagcaagtaattgcaccaaatcccattccagttacacaaaaatctaaaactttatgccaaattttcattttataatcccagtttcttttctaatttaggtaaatatcttcttgaaacatcagtcttctgtttaaaagctagttttgcaatcatattgcccgtaaatcctgcctcgagtgcttcaagataattcaaattaataatcccatattttgatacctgtacaaagtcattatttaatttctctagaacttgatataagcgacctgtagttttaatgacagcacttttggtataaaaagttaattctgttttttcaacctcgactttgataatttcttcaattttaatagttaaaatccgatcttcagtttttaccggcagaattgaatctacctttttaccaaaatcttgaatataagccaataaattttttacttctgctgtttcctctaaagaaattactttgatcttaatttgatcttttttcaaattagaatctgactgaaattctacattcacgtgttaattcttctttctatcaagcatgactgcgagacatattactataactgtcaataagagtgacatagctattattaccaatgcattatccccgttagttaattgatgagacccaaatttaaaatgaatccctaaatactcaatcaatttttgacgcatttcatctggaacatcttcctgacttaatttatttaagagcaagcttctaaaacttgccgcttcataactacttggaaacaattttactatattttgcgcagtttttgataaagttccataaggcatgtaagttgcaaccataaatccagctgctgctccaattaccgccgacaaacgactaaacgttgttgaagaattgataaataaaacgataactaagtttaataaagttgcgccaattgcacctaataacataaaacctaatgctggcaaatatacagtcgattgaatattcaccttatcaaccactgaaaaataaattgccatcaccaaaaaggtaataacctgcatcaagaaacttattattaatgctgaagctacgtaggccatgcattcactaattggagttaaattcgttagctttatatcatcaattgctcggctttccctatccttcaccatttgaccaagtgcttgaaacgaagtagtaatgcctgcaattgaaacaataccgccaagcatccagaggtccaataattgttttgcatgactaacgttttgccaagaatcaacaagattttgttgtaaaaatccaatataaatcacaaatgaaattagtgcaccaaaacatgacattactacacctggtttattagcaaaataaattttgatatttctcttcattaaggcgaacattattgaagctcctttccagcaatcttgataaatgcatcatcaattgacccttttcgatattcaaatgtatcaatcttatcttcaaacttatgtaaaaggtctatgacctgattactattaagcccatcgatttcaatttgatcatctgacttagaaatttgtttaaaattagtagaaaaagtttgcccttgttttaggcaaattagcagccgactgggtgcatacatctctttaatttcttctgcagagccttctgctaagacattgccattttccaaaatatacatctgatcagcattttcagcttcctctaaatagtgtgttgtcaagaaaatagtcaacccctgttctttttgaagcttttgcaataagtcccagataacaattctcgtttgtaaatctaaccccgcagttggttcatctaaaaataagatatctggatgatcaattaacgctctagcaatatccactcttcttttttgtccaccagacaaagtaccgtatttttgattgaggaaacttctaataccaatcaacccaatcaatttttctaaccactctttagaaaaagttttgtacatccttgcccttaaatatagattctctttgacagtcaatacatcatctaaaacactattctgaaagactactccgatttttagatccttagcatacgtgatagtgccactagttggtttcaataggccaattagtatgttgatagtagtagatttacctgcaccattcgtacctaaataagctaccaactgtccacgattaatcttcaaattgaccttgttcaaggctaacttcttaccatattttttagttagattaaaagtttcaattaacataaaaagacttcctttctgaattcataatcagaatacagaaaagaagcctttttgtacttaaacctcaaataagtggttcatttttacacacaaggtgcaaaatagctaaatcaaaattgcattattcatctatcttaacgtattgtcctttttcatctacaacacctttgaaatggtgcatgctgccatcttcggcctgaaattcacctaagtcaatttccccatagccctttgtagaatcagtaaccttaacatcatcaaaagtttctctgaaaaattgatgaacaattctactcttcaaccgtatatcctttgaatgctcaaaggctgcagacaacgtaaagccctcatctaattgttccttgataaaaacaattagatacaaggtcgctaaattatagcggcgcacaccactttgatcatctgaaatcggcttaatgtagcccttagtttcccaatagcgcaattgcctttgcgaaacaccagtcaatttactaacttcaccgattccaatttctaaattttgaaaaatgtcatgcataatttttttagatttcatcctgataccaccttacagtatagttatattttatacgcgtggtgctagttaaatcgttctagacaatatgccatattataagctaaaatagctatttctagccgttgttgaaaacctactaagctcctggctcgattattctcagcattgtaatagctaagcaaagaaaagtcgctttcgattgttcttctaattgccattaactgatgatcattatgctttttagcacccctcatgtttttacgatatggtgtccaaagcacgtatcccatacgctttagcttggctgctaagtcttttcctaaatagccttcatctcctaaaagataatggttaattggatgagcattgatcatcaattctaccgtctcttttgcatcatgtaccgacgccttagtaactgcgtagtcaagcagatagccatcatcactcactattgcgtggactttgaagccataatagtagatttttttcgtcgctttataaccaatatcggctatgccacggaagatcttaacgtgataattgcgaacaggctgacaaactggaatcggaaaactgtcgataatcaataattctccacctacctttacttcctgattccaaccctgacggatacaacgaattagaggcaagagcattcgagctcgacggttaaaacgagaatgagataagccaacgaagaatttacagaatcttcgttgagattcaattccaatttcagtttgccaaatgagcatcgctaagatagaactatcaggaagcttggtctgatcaacatttttacgatgtttaagtccatcaggcgcataaagcttatacagcgagcgacaaatcacatttaaccgattaaaactaacttgtaaatggtgagaaaaacgattaagcttgagatagttcaattagatcagactcttttctatttaaattacttacaacttgagtctagtctaattggacttttttattaactaaaacgatttaactagcaccacgcgtatattttatatattgttgttatcttttgcaacacttgtgttaatttatctaacttatttgtaagattatttgacaatggcaaattttaagcctatagtttttatagttaacttttataagagaaaggaatattacatgaacaagcaaccaacggatattcatggaaaagcttataatcgaaacctactagttttagttttaattataggttctttctgtactgtattaaacggaacactgctttcaacagcgcttccttcaattatgcgttcatttaacatcagcaccgcaactgctgaatggctttcaacagcctttctgttagttaatggtgttatgatcccaatttctgcatggctaatcaatcgcttcggttcaagaaaaatgtatttgtcagccatgtcaatcttctttattggaacagtgatcgccgcaattgcacccaattttggcaccctgcttgttggaagaatcattcagggattaggcgtcggcgttactatgccacttttacaaacaattatgctttccatcttcccagctaataaacgtggtgcagcaatgggaactgtcgggattgttattggcttagcaccggcaattggaccaacattatctggttggattgttgataacctttcttggcgttatcttttcagcatcattgccccaattgcgggaatagtaattatcttagctttctttttaattaaagatgttttaccaactaagaaagaaaaaattgatgtttggtcagtaacaacctctactctaggcttcggaagtctgttgtatggtttttcagaagctggtaacaaaggctggaccaatcccgagattttaggatttattggatttggaattatatttgtaatcctattcggtatccgccaattgaaaatggatgacccatttttggacattaccgtttttaaacactttgaattttcactggcagctgccttaagtggtatcaccaacttagcgatggtcggcattgaaatggttttaccattatatattcaaaatttgcgtggcgtttctgccttccattcaggtttaatgttactacctggtgcattgatgattggtattatgtcgccaattactggccgtttattcgacaaatatggtgcacgtaaaatggcaattactggtatgactttgttgaccattgggactattccattcgtctttttaactgaacaaagttcatacacgatgattatcattctttacgcaatcagaatggtcggtgtagctttggtaatgatgaatgttactacatctggtatgaattctttaccattaaacaagatttctcacggtactgctgttaacaacactttcagacaggtattaagttcaattggtactgcaattttggtatctgttttaactacaactaccaataataatatgcctggtaaaagtttacttcatgcactgccacttgaatacaagactagagcaatcagtgcaactttagacggttttcatgcttcatttgcaatgagtatcctcttctcattaatcacattagttcttgcattcttcttaaagaagggcaatcgagcacgtgaacatcaagaaaaggtggatggttaaatgatacttttaattctaatcgtagctgcaattatgtttatttactttaatatcatccctggaaaaaggcatacttctattgcatggctatcattaatcgtaacaattctttgtgttgttggcattgtagaacatgattataatcactggggaatgaaaactgaaacaactttaagcactaatactctagtttccagtgctactcctcgcctgccaattttgctttatcagcctttaggtaatggaactgaaaaagtttacctttataaaactggtcagcttcaaaagaagccaaaatctattaaattagataaagtatcgacaaaagtaaaacgaagcagccaaccaaaagtaatgattaagactactcgctacacctatagcaatacctttaatcaaataatgtttggcgtctttggtcatgacaaggagttaaaacacagagaatatattttttctattccctccaactggaaagtaatgtcagttaacgatgccaagcagttgcaaaaacaaatgatgaaaaaacagcagtttttaaaacaaaaatcagcccaataaaataatgaagctcaaactttgatcatgatatgaaccccgaaattcggacatgaatttcggggtttttatttatggctaaattatctaaacatgacaaaattgatatttacaatagctagaaaaattaaattcattttaactcaaattttaccatatgatttaagttaacttaaatcacctttacaaacgcttatgaaatataatttaactaaatctaaatgtagaaaattatttttatcatactgcctatttcaattgcatcctatcattaaagtaatttttataagccaaatagccactaatcacggctccaaggccagtggcagaaagcaacataaatgtaatcataatctgatacttaattgcataaatgggatttacaccagcaaaaattaagccggacatcattcctggcaaatttactaatcctacagttttagccgaatctatcgtaggctgcatcgcagtcttaatgctccttcttaaaattggcatcgatgcagttttaatatcactacccaaagccaacttttctaaaacttgttgatgcagatcattaaagctatcattcaacgctttatagcataagccaactgccaccatttcatttccagcaatcatccccgtaatgggaatgacctgcatagggactggtttaattacgccagaaaaaatcagaattcctaatgtcacgtaagtccctaccgcttcggctattatcgaattccaaatattccgccccggattaggatcacgctgattagcattccaagatgcattaaaaattatcacaatagttgaaaccaaagttagccacaaggcattaacatgaaaaataaacttcaaaacgtagccgattacgactaactgaattatcgccctaatcacgctaattaaaatatccttggttagtcctaatttttctttcacagaaattccaatggaaactaacaccagtgcaaaagctaatactaacgaccagttgctaactacaacatttttcattcgattattccgcctttttttactcttaaaatattacttgcttcatcaatttcactttgatcatgtgtaacttgaataattgtcacgcctttctcagaaacatccttaatcaaattatgtacaatatctttactttgattatcaagcccggtagttacttcatctaagagcaatatctttggtaaaaatattatgtttcgaattaacgcaactctttgcttttcaccacctgataaagcagtaatctttttatctaaaaaatcagcagagagatcaacttgattaagtaaatcagctatttgcttgtcatttacatctacttttctaatttcatacgggaaaatcaaattatctcttactgtttgcccaaataaagacggctgctgaaaacaatatgaaacttctctacgatattgaactggatttaaggagctaatgtttttttcttgatatagaatatcgcctgaattagcactaattaaatttgcaatcaatcgtaaaatcgtactttttcctgcacctgatgggccaattaaggttagaaaatcgcctttattaaccttaaatgatacatcttgcaatatttgttttttatctgcactatattggatatgttttaattctaatattttcattcttttgcctaactaaataactcatttttctaattatacaactaaaaaaataaaggaaatccaatattttcattgaatttcctttatttaaattaatatcgataatgattacttagtcaacttttgtttactttcaagtaattcagcacgttgagctaagttcatgtataacttgttgttgtaggttgcgataccttcaatttcacgaccagtgtggtattggtaagtatccttaacttcaccatcagttgcaatcttagcaattacgtcattgaatgcaaggtagaagttattgttcttggcatcataagtaaacccttgagtgtatgtgtttgctacaatgccacccttagttgcacctaccatagttggataccagttatcgcctttgcggttgaattcccagtattcagtttggtctttttctttattataaagagttgtgtaaagcttgtgatcatttacaacaacaccattattgaagtaacgaccgtctgaatcactaccgttccagcatttaatagtccaaatcttgttaatgcacatatcgctcttccgaatttggattaactcttcagacatattgctcttgtatgaaaccttattattgttatttagaacgtaaatgtatttatcagttgagcccattgcttgaccgtgaccaattggaatatatggactaactttaatgttcttaacgtaagaattgaacttcttttggctcatatcaagtaagtattgtccgttaaatgcattggttaaatggttaagattatatcctacaatatgaccattgctaatcagagtactacttaataaactagtgtacaaccagccatttgacatggtaattccttcaggaatatgacctacacggttaatatagtcatcatttttaatgtcacggtaaacacttaataaaactggttggaagaagcgagtagtgaaatctaattttccgctttcactatcataagcatgcttattcttatcaggagtaaaatcagtcttagttacatagttagcagaacttccatagtaagtcttccaggatttcaaatcgccgttaaatggcttagcttggacgctatcagcatcagcaattccttccttagtactctttctgacagttaccttaacagttgcctttgctttaccatagctatatttaacattataggtacctggaattgagcaatcgattgcatcttctgaaatcttaatatctgctgtatcaattacagtacccatataattggttacataacttaccgcatctgttggatcaaaatcgtaatgactattttgtactaaactgatagtctttggtacagcgatagtgtttctagtaaagtagttttggttaacataaccaactttacgaccatttacataaatacgccaataagttgcatcctttgtcttaattctctggtcagattgaatatgagcatattgataatcgctagcatcagcaatcttaccactaggtttaccattactaatctttttataaacaggataattcttattgctacctactttaaccattaagtcataagaagtacttgtttgagctggtcccttcttcgcactggaatcagtcttggcagtatctgtattactatcagtagttttagaattatctgcaaatactgcatttgtagaaccaattaacaaaccaacacccagtgctacagctgaagtagcagttaaaattttatttgaatacttcaaacctatcctccgtatcttatattttgcattttacttttatattataatatataaacactgttagctaaaatacatttttattaccattgttaccattgagcttctttatttgacactttcattacgaagtgatttaattagcactgtacttgaaagagtgctaattaatacgaaatcaattaggaggcaaatttatgctagtacctacagttattgaacaaactgctcgtggtgaacgtgcttatgacatttactcacgcttattaaaagacagaattatcatgcttagcggtgaaattaatgaccaaatggctaactcaatcatcgctcaattactcttccttgatgctcaagacaataccaaggatatttcactttatatcaactcaccaggtggtgtaatcacctccggcttagctatcatggataccatgaactttattaagtcagacgtatcaactattgcaattggtatggcagcttcaatggcttctatccttttgactagtggtaccaagggtaagcgtttcgcacttcctaactcaactgttttaattcaccaaccattaggtggtgctcaaggtcaacaaactgatatccaaattgcagctaacgaaattttgaagagccgtaagaagatcaacgaaattttgcacgaaactaccggtcaacctttggaaaagatccaaaaggatactgaacgtgacaactacttaactgctgaagaagccaaggaatatggtttgattgacgaaatcatggttaataagaagaagtaattaattattaaaaattattcacactctaaaaggagcttgcactcattgtgcaggctcctttttcttattctcttaaactctcagctaactcatgtagtttcttaaatcggtgattaactcctgacttcgaaatcggaccatccggaatttgattagctacttcctttaaagttaattctggatgcgccaatctaaaacgcgctaaaacttgcaatttctctggtagatcatctaagccgttttcttgttcaatcagctggatgtcttctacctgcttagctgaagctgaggctgtttttttcatattcgcggtatcacaattaaccaagcgattaaccgaatttcgcatatctcgcataatacgcaaatcttcaaagttaagcattgcattaagtgcacccactatatgcaaaaagtcgccaatttttgcggcttcttttaaataaacaatatagcctcttctacgtttagttgctttagcatttaaataaaaataattattcatcaacttacataaatcctcattatggtcctcataagttgaataaatctccaagtgataacgactcgtttctggattattgacactacctccggctagaaatgcaccgcgtaaataggacattgctccttcacgtgaagtcataattctctgcggaattcgcgttaccaaacctttttcaggatcccagatttgtaagttttctaggatttcttgtaccttctgattcaatcgtaccaaatattgattattttttttcaatttcatcttgcgcgagacaatcagcaatggctcaataccataagcaatcttaatcagcttaaaaattcgtcgagcaatcgcaggattttctgtagtgatatccaggctaaattgatgatcgtgcaagtttaatacaccattcattcgcaaaaaagcagctaactctgctttggcatgctctggatgcacctcaagcgaagttagctcctttttgacttcactagcataactagccatcattttccttcattcttttacgtgacattgattcaaatgccagattaataatttcttttcctaccttttcaccatcatgaaataccaatccatgacgttgatcgataaagtcatcagtaatgacacggcagttttgctttcttaagccttcaaagtcattcttaacaggctcaagataagcatcataatcttctgggtgaaatttgctcatatcaattttggcaccattaaccagagcggtattgatataatttccacctaagtgatcgttaattacctgtacgtgttccacatcactaaagtgatctgtctcaccacgctgagtcatgatattgcaaatataaataacctcggcgtcagtctcacgcactgcttcacctaaattagagatcattaagttaggtaaaattgaagtaaataaactacctggcccaagtacgactgcatcagcttgcataatcgaagccagtactggtaaaacagctctaggctcttcatccgaatcagtatcggtcacccagacacgcttaatccgcttatctttagatgtgatttcagtttcacccgattccgtagttccatccacgaattctgcgtttaaagtcaatggttcattggaagctggaaaaacatgaccatcaattttcatcatttttgacaaagattgaactgcatcaaagatattgccatgcatttcattcaatgccgcaataattaaattaccgattgcatgtcctgaaaaaaaggaatcggatgaatcaaatcgatactgaaaaatattcttttcttcctgaggtaagtcactaagtgataccaaaacattacggatatcaccaggtggaactacgttaataaagttacggattgaaccagatgaaccgccgtcatctgaaaccgttacaattgcagtaatttccgcgttttgatcttttaaggcattcaaaataactggtaaacccgtaccgccaccaattacgactacacggggacgtctgcctttaatcacgcgaacaatccttgtttctccatatggcacaggtgcgcacctactttctaatataacgactcacttcacggtgagtaatatcgacttgatattttttagctaaatctcgtgccaactgttgggcaattgaaacactccggtgttgacccccagtacaaccaattgcaatggtcaacttttccttcccctctttgatatatccagggatagctgtttcaagcaaatcaagcaattttttataaaagacctgtgtttcttctttgttcatcacatagtcaaatacacgcttgtccagtcccgtaaatggtcttaattctgaaatataaaatgggttaggcaaaaaacgcacatccattacaatatctgcatcaattggcatcccatacttaaagccaaatgacatcacttcaattgaaaatggctgccgcttgcgatcactaaatgtattgattaatttttgctttaattccttagtcgacaagtttgacgtatcgataatataatttgatctatttttaattggcattaaaatacgacgttcttcttgaatgccatcaagcaagcgacctttgccattattggctaaaggcggaagacgccttgtttctttataacgagcaaccaagacatcatcggaagcatccaaaaataggatagtagcttgcacattgccattatcttcaagtgaattaacttcatccaataaatcgcgataaaatgtcttaactcgtaaatcaattactacggctaccttatgaaagtcattggaattattaattaaatcccaaaaactacctaataaagttggaggaagattatcgactacaaagtagcccatatcttctaagtcatgagcgaccacagttttacctgctccgctcatgcctgtgactattaataattgttttttctcatcagccatgctaaaatcctcctctttacaaattatatcataccgggtgtgtcataattgtgcaaaaaaaagaagcctttcggcttaaatttttatcaaatattaacggtgcataaatgcaaccacaatttcattaatgccaaagactaataaccagaatgcaactaaccatactaagcttaaggctgcgattactggattaataattaagaagaaggcaataatcaaacttaaaatattcaaaatcaagttaaatacaaagtatccggttgaaaatgcacgtaagtgccatgaccaagcaatacctacaactgaatcaacaaagaaccagattgcaaataagtaagcgatagtcaaaccaccaatatcatatgagcaaatgaacaagataccgataatgatatctaatatacctgacacaattgctacccaactacgtgagaaaaattcacgaaagcgtgagtaagcagccaaccatacaataccttgaacgattgatacaatagcaaaaatcaagacaaatgcatgcaaccctttagctgggtgacgtaataacacgaacgcaactacgaccattaagataccggcaataaatgcgccccagtcaaagccgcgattatctctagaactagaaaaaatatccatttttattcctccttgcagactattttacacttattcaaggttaataaaaactattggctattgtcttctagcctatttttttgcttcttttgttagtttagtatcgcgttctaagactggtttcaaatactgaccagtatagctttctttaactttcgctacttcttctggcgtaccggtagccacaatttgaccgccacgttcccctccttcaggacctaagtcaatcagccaatctgcatttttaattacatcaagattatgctcaataattaaaaccgtattgccttcatctaccaaccgctgcaaaacttctaataaacgcttgatatcatcggtatgcaaaccggtagttggttcatcaagaatatagaaatttttaccagtagaaagtttttgcaattcagcagctaatttcattctttgagcttcaccaccagataaagttgtagcggattgacctaatttcacatagcccaaacctacatcaacgatagtctggagtttacgctgaatcttaggaatattttcgaaaaacttagttgcttcattaatcgtcatatcaagcacttgagcaatattctttccccgataagttacttccaatgtttcagaattataacgagtgccgtgacaaacctcacatggtacatatacatcaggcaaaaagttcatttcaatcttgataattccatcaccatgacaggcttcacaacgtccacctttgacgttgaacgaaaatcttgctttagtataaccacgcaattttgcttcattagtttgagcaaataaggttctgatatcatcaaaaacactagtataagttgcaggattactacgtggtgttctaccaatagggctttgatcgatatcgatgattttttcaatattcttgtaacccttgattgacttatacttacctggcttagttgaattattgtttaatttttgggctaaagcgcgtttcaagatcatattaaccaaagtagatttaccagaacctgagacaccactgaccacaataaatttgcccaacggaaaatcaacattaatattctttaaattattttcttgagctccagtaattgtaatctttttaccattgcctttacgacgcttcaatggaaccggcacaaattttttaccagacaaatattgccccgttaaagaatcaggattctgctctacttctttaggagttccttgtgccataactttaccaccgtaaacaccggcaccaggtcccatatcaaccaaatagtcagcttgccgcattgtttcgtcatcgtgctctaccacaattaaagaattgcctaaatcacgcattctctttaaagaagcaatcagccgatcattatcacgttgatgcaaaccgatagatggttcatccaaaacatacataactcccgataagtttgagccaatttgagttgccaaccgaatacgctgagcttcaccaccagacaaggtattagctgatcgagaaagagttaaataatctaatcctacactatccaagaatgaaagacgatcgcgtacttcctttaaaatcggcttagcaatcatagtctcttgctcgcttaatttgacgtccttaaagaaatcaagtgctttatcaatagaaagctccgaagcttccgcgatatccttgcccatgactttcactgctaatgctttttcattcaaacgcttgccgtgacaagttgaacaagtaagttcagtcatatatttgcccatcacatcacgcataaacttggacattggtcgtttataacgccgctcaacattggccattactccttcaaatggttgaacggtatcattaacgccaaagtcaccagttacatggaatttcaccggcttagttgagccatgcagaataatgtcgcgttgacgtttagttagtttattaaaaggcttatccatcggaatttttaatgccgtgcaagcttgttccaacatttcagtatagtaattggaagtcttccatggagccagtgcaccttcagctaaagattttgttttgtccggaacaaccaaatcttcgtctactgctaacttcatccctaacccatcacaatcagggcaggcaccaaatggtgcattaaaggagaacagtcttggttccatttcacccacagtaaagccacactttggacaagcataatactcagaaaagttaagcatttcaccgccaattacatcaacattcatgtagccatctgacaaacgaagtgcagcttcaacagaatcaaataagcgagacttaatgctatccttaacaatcaaacggtcaacgacaatatcgattgagtggcgcttgttcttagctaattcaaaatcctcaccaatttcgtgcatctcaccatcaacaattacacgaacatatcctgcacgttgtactcgcttaaatacttccttgtgttctccacgcttagcacgaataactggcgctaaaatttgaattttcgttctttctggtaaagccatcactcggtcaaccatctgatcaactgattgtcgttgaatcagcgtcccatcattaggacaaattggatggcctactctggcccaaagcaaacgtaaataatcattaatctcagtgacggtcccaactgttgaccgtggattatgtgacgttgttttttgatcaattgaaattgctggatttaaaccatcaattgaatccacatctggtttatccatttgccccaaaaactgtctagcataactagaaagtgattgcacataacgtctacgcccttctgcataaagcgtatcaaaggctaaagaacttttacctgaaccagataagccagtaataactactaacttatccttaggaatagttaaattaatgtcttttaaattatgttcacgtgctccgcgaataacgatcttatcatttgccattaaaattctttccttttcttgtcttcggttttcttgatgatttttgcaattccataattgcatcccgcaagttagcagcttcttcaaagtcaagcttcttagctgcttcttgcatttgctcttgcaagttgctaatcattgtcttcttttgcttagccgtcaattcatcaaaattaagatctgcaaaactatcagatttttcttctttttcactcgacggtttagtaatcgaaattacgtcttgaatcggcttaatgattgtcttaggcgttatgccatgctctttgttaaattccatctgaattttacgccgacgcttggtagctttaatcgctgctctcatggaatcagtaatcgtatcagcatacattattacttcaccattggcattacgggcggcccgtcccatagtctgaaccagcggccgatatgctctcaagaagccttccttatctgcatccagaattgctaccagtgaaacttccggtacatcgattccttcccgcaacaggttaattccaattaagacatcgaacttacctaaccgtaagtcacgcaaaatttgcattctttccagcgtcttaatatcagagtgcaaataacgtactttaattcctaagtccttcaaataatcggttaagtcttccgccatttttttggtcaaagtagtaacaaagactcgttcatgacggtcaatccgtttattaatttcgccaactaaatcatcaatttgaccctcaattggccttacttcaatcttgggatcaagcaatccggttggtcgaataatttgttcaaccttatgatctgttcgttcaagttcataatcacctggggtagctgagacatacaaaatttgattaacatgcttttcaaattcggatagctttaatggacggttatcaagtgcagatggcaaacggaaaccatagtcaatcaaggtttgcttacgattacggtcaccattgtacattgctctaatttcaggcatagtagcatgtgattcgtcaattaaaattaagaaatcatctgggaagaagtccaacaaagtatacggtggctctcctgcttttcgtccttccatatgccttgaatagttttcgattccgttggtatagccaacttcacccatcatttccatatcataggtagtacgttgcttgattctttcagcttcaagcaatttgccttcgccttcgaactttttaacctgcaatttcatctctttagaaattgctcccaaagctcgccgcaattgctcgtcattggtcataaagtgcgtagctgggaaaagcgaaatactctcacgctcaccgatcacctcaccggttaacgaatcaacttcaacaatgcgatcaatttcatcaccaaagaattcaattcgataagcatgattagaattgccggctggaaagacctcaactacatccccgcggacccgaaaacgaccgcgttgaaagtcaatatcattacgatcatattgaatatttaccaaatcacgcaacaaggtattacggtcatattcttcgccttcatggatcatcaagacactgcgcgcatactctttaggatcacccaaaccatagatacaagaaaccgaagcaacaactactacgtcattacgctccattaaagctgaggtagtagcatgccgcaactgatcaatttcatcattgattgccgaatccttttcaatataagtgtctgattgtggaacgtaagcttctggctgataataatcatagtatgaaacaaaatattcaactgcattattaggaaagaaacttttaaactcaccatatagctgccctaccaaggtcttattatgcgtaataactaatgtaggcttattcagcttagcaataatattggccatggtgaaagttttcccagtaccagttgcaccttccagaatctgttctttatatccttttttaaatccagcagtcagtttatcaatagcttgctcttgatcaccggctggtttaaactttgatactaattcaaatttgcgatttttttgtcgtttaatcataaaaaactcctcaagaaaaaagttggacaagcatagtccaactttttaattagtatctatattttactaccgcgaacgtgctttcgcacgaaaaatgcttaattatttaagtaaatctgctaaagccttttgataatcttcagctgccttttctgcagtggcaatgtcttttttgtttacaccaacataggccttaattactggttcagtacctgatgggcgaagtgctacccaggtttcatcatctaagaagtacttcaacacattagattctgggaacccttctaatggtgtcttcttgccattttcaatagtttctttttgcaagaaatcttgaatcttaagcactttactaccgccgatttcggttaagtgctcattacgcaacttgctcattaattcggccatcttcttttgaccaccaatacctggcatttcaattgcacgggtaatttcataagcaacgccatacttttgccaaatttcttgcaaaccatcaaagacagtcatcccacgtgaagcatagtatgaagcaacttcggcaaacatcaatgcaccctgcatagcatccttatcacgagcaaatggtttaaacaaatagccatagctttcttcaaagcccatcaagaacttagcatcaccagctttattcatccggtcaacttcttcaccaatgtacttaaagcccgtcaaaacatgcttagtcttaataccaaagtcctctgcaatcttaaatggcaaagcactagaaacaactgaagtaacgatctcataatcagggattaattgaccattttccttcatatgagccaataggtagtaagccatcaaagtagcaatttggttaccagtcaaaacttggaaatcaccatcagtttttctaactgctgcacccattctatcagcatccgggtcagtagcaataatgacattagcatttaccttatttgccaacttaaaaccaggttcaaaaacatcacggtattctggattaggcttaattgtggttggaaattctggatcaatgattgattgacttggcacaggaatcacattatcaaagccgccttgtctgaaagcacgatcataaagcatcttgcctgtaccatgaagtggagtataaatgatctttaacttgtcagcgttggccttaaccatctctggatcaacagttacttgcttcaattcattcaagtaatcttcatcaacatcttcacctattaactgcaaggtgccattagcacgcaattcttttactggtgcagccttgacagcaaaaatatcagttactttttgagcataagcaaaaagtcgatctgcattatctggtgccatttgtgcaccatcttcaccgtaaactttatagccattgtattgcttagcattgtgtgaagcagtgatattaattccagcgaaagtatgcaaatgacgtactgcatatgaaagttctggtgtcggtcttaaatcatcaaataagtaaacatgaattccgtgtgcacctaaaaatctggcagcatgttctgcaaactctcttgagtgatatcttgaatcaaaggaaatagctaccccacgctttttagcatcagcaccattttcttcaattaaacgagctaagccttcagttactcgacctacagtaaacaagttaatccggttggtaccgggttcaagacgaccacgcatccccgcagtaccaaaattaatatcctgtccaaaggcatcttcgatccatttttcatccttgcccaaagtatttaattgatcttttaaataatctggtaaattagtagctttttgccattctgtataaatttctttagcgtccatcaatgtcctctattcattaaaagtcggatttctaaagcgctttcaaattattaacgattttctattatctgctattaattataaaacttattagtcattaatttaagctttagattgattacgattcattttttatactatgccatccaaataatactgctaaagtagcaatcacaatcactaagacaatgcccaataacgataaatgatattcaaaaatgtataaaatactaaacacaattgcatagactacattaattgccaacttgagatatttaagtttagaaccgaattttttctttaatgacttatcaaacaaaactagcagtgtattaagcgctaaaaagatcagtattagaatcaaaaaccatgtttgaaaatcactattaaaatgatactcactatgcgctattattaacactattgttataatgactattccaaataacaataaataatccaacacctttttgaggttcgttaaattcttcctgtccgcatattgatatagtcctgccccaattagcaatacaataattgtcggtaatagccattgacctccactaactacactagtcaaatccatcatttcccctcccttttagcctttctcttcatgatactttatttctacaaaaaaagacatgtccaatacgaacatgtcttaatgaaaaaacgaataaatttaatttttcttgtcttgtaagtcttggtagtaattatatgcagcttgaccagctacactaccttcaccaactgcattagcaatttggcgtaaatctttttgacgaacatcacctaaagcaaagataccaggcaccttagtttccatatgatcatcagttacaatccaaccgtggtcatccaagataccaagatccttaaaaggttcagtttgtggtaaaacacccacgtaaataaagacaccagcaactggaatttctttttcggcaccagtttccttatcgcggtacttaacccctgtgactttcatgtcatcgcctaagatttcttcagtttgtgcattccaaatgaaatgcatcttcttgttggcaaatgcacgcttttgcaaagttggttgtgctcgcaattgatcacggcggtgaataactgtaacgctcttagctaattgtgaaagataaattccttcttcaattgctgaatcaccaccaccgatgacagctacatcttcatctttaaagaaagcggcatcgcagacggcacaatatgaaacacctttgcctgaatattcttcttctccaggcacattcaaatgcttatgatctgaacctgtagcaataattacgatcggtgcacgatactcattgccatcatcagttttaactaacttatcctcgccatcgagttcaacactttgtacgttgccatacttataatctggttcaaacttcatcattgtgtcgtacatcttttgactaagttctggacctttgatttcagaaaaaccaggataattgtcgatagcatcagtattgttcatttgaccgccatagggaccgcgatcaagaacaagaatctttaagttagcacgcgcagcatataagccagcagtcattccaccaggacctgcaccaataataattacgtcgtatttatcagccataatctatccttctttctacttacttttgataagcaaataatacaatagatttaacttcttgccaactattttgcttatcttttataaacgaatttcaggctttggttctctacccatcattttcttaatttctgtatcaacatcagcatcttcataaagaacacggtagattgcctctgaaattggcatatcaatgcccttttcttcacataattcgtgaacagctttaacagtagtagcgccttcgacaacttgtcccatatttttcaaaacataatctaaagtcttgccttcgccgatttgtttaccagcacgccaattacgtgagtttactgaagtacaagttacaattaagtcaccaatacctgacaagcctgagaaggtcattggcttagcaccaaagtattgcacacccaaacgagtgatttctgctaaacctctagtcatcaaggcagctttggcgtcatcaccatatccttggcctactaaaatacctgcagcaatcgcaattacgttcttaacggcaccaccaacttctacacctactaaatcatcgttagtgtagaaacgaacgtagtcattggagaacaattcttgtacccgcttagcattttcttcattagttgatgcacatgcaatcgcggttaaatctttttgagcaacattttctgcgtgactaggacctgaaattgcaacaatcttatcttcatcatctggataaatttcttcagttaaaatttcagaaataagcttcttactgcctggttcaatccctttagttgcagtaactaacagtagcttagcacccgtcttatctaaaaccttgcgtacgtttttagcaacgattctaactgccttagttggcaaaacaaataaaacaagttctgccccatcaagagctgcttccaaatcaccagtagccttggtattctcatttaatttccaatccttcatatagtggctattggtgtggtgagcgttaatttcttcattaacactatcaatgttaccgtaaagagttacatcgttaccattatcggctaacattgaacccaatactgaaccccatgaaccattacctaaaactgcaatctttgtcattttttctctcaaactttctaattaaaatcttttattaattctaatctcttgaatacgggtattttaatccactaccatccaaataccattttggattaacgactttccgccgataaatccataaaataattgtagcaataaagaggattaaacttaatgcctgtgatactcgtattataccaaaaatatacagactatctgtcctcattccttcaacgaagaaccttactacactataccaaagaagataggtcatgaaaacttctccctgcttgaagagatgtttttttatgacgcaaggatagaattaagattaagccaatcaaattaaaaaatgattcgtacaaaaaagttggttgataatacgtcccgcctattttcatttgctcaataataaattgtggtaagtgtaagctttgtaaaaaatgaagagtagttggtgcgccgtgcgcctcttgattaacaaaattaccccagcgtcccaaaatctgagctgccatgactccaggagcaatgatatccagcattaaaaatggaggtagcattcgtttataacagaaattcaacagcacaattaagccggcaatttaaaccaccataaatcgcaatcccaccattccaaatcgcaataatttgctcgggatgctgtgaataataaccccattcaaaaatcacataataaatacgtgcgccaacataccctaacggtactgcccacaatagcaaatcgacaaaatcatctggaataatttgacgtttttttccttcgttaatcgccatccagcaagctaacataatggctactgccataatgatgccataccatttgacacttaaattccctaaatgaaaggccaccggattaattactaaattagtcattatgcggcaccttattcgtatcttcttttgagtgctctgaaatcagactagtcaaattattatcaaaagtttgagttgcatcatagcccatcttcttagctctgaagttcatcgctgcaacttcaataataatttcaatattgcgtccaaccttaactggaatattaacctgtggaattggtacattgcagatttcacgcgtattttcttgaaaacctaggcgatcataattagcttttggatcccaattaaccaaattaattaccagttggatttctgttctattttttacggcaccggcaccaaataaattcatcacatcaataatgccaattcctctgatctccattaagtgctttaagatctttggtgcttcacccacaacggtattatggtctttttgaaaagcatctactcgatcatccgcaattaatctgtgtcctctttgaactaatcccaaagcagtttcagacttaccaacaccagatgcaccagttaacagcacacccatccctttgatttcaaccaaaacaccatgaatgctggttcttttggctaaacgagcacgcaagtattcagttaaaatactggatatgtaggtagttgactctcttgtacgcaaaattgggattttgtgttcctctgctgccgtagttaattcttccggtacaggcaaagagcgagaaatcaaaaaacacggtgtagccttagtacacattttgttaaagacatgcattctaatatcatggtccaagcgtgccgcatatgaaatttctgtccgacccaataattgaattcgttgcgcaggataaaaatcaaaataaccagttaattctaatccagggcgataaatatcagaaacataaatttcttcatctttgatatattcctgtccttggtaaacttcaaggatactctgattgtcctggatcaatttgcttaatctaacttcatcagccatattaggcctcctaactatttatcaatatctttagtggtgacatttctagctttttttcttggtctaggaccagaagtactagtagccttaaaccactcacgataacttccactacttggcatattatcttgatttttccttccagtaaaccgataaataagccaaatgattaaaatcgcaattacagctactggtaaaagtaaaataaatgccttaaatagaacaaacaataaacttaaaataattagcgctactaaaacaagcgttacaatttccattaaactcattttttaacctaatctggattctcttgactaagcaaccactgtaaataggaataaataaacggttgcaattttccgtccattactccttgagcgtcagctgtttcatgacctgtccgcaaatctttcactaggttgtaaggatggaaaacatatgacctaatttgtgatccccagccaatctccttttgatcgcctttcagagcctgcttttgcttacgctttttttcttcttctaagtgaaaaagctttgctcttaattcattcatcgcagtttcacggttttgcaattgtgaacgctgtgcctgagacgtagtcacaattcctgttggtaagtgcgtaattctaacggcactagaagttttattaatatgctgcccaccagcaccactagagcggtaaacatcaacccgtaaatccttaggatcaatatcaatttgaatactgtcatcaacttctggaatcacttctacagaagcaaatgatgtatgccgtcttttagccgcatcaaatggcgtaattctaaccaaacgatggacaccattttctgatttaagcattccgtaagcatttttacctacaattcgcgcactaacgctcttcaacccagcttcttcaccaggctcataatcgttgatttcaaatttaaaaccagctgtatcacaataacgttgatacattcttagaagcatctgtccccagtccatcgcttctgtaccgccagcaccagggtgaatttccatcaaagcattatggctatcatacttacccgacaagagcaggtctaactcataattatgaaaatcttcttgcagcgtagctagatccgcttcaacttctttttgcaagtcaggatctggttcttcacgcaaaagttcaaccgcagtagtttcgtcttcgtagctagtttgcaattttaaaaatgaatcacgtttttcctttaatcggttggtttcactaattaatttttgcgctttttcctggttattccaaaaatcaggctgcgccatcttgttttcattaatttcgatgctttcatcaatcgcatctaagtcaaagagaccccctaaagtgatttagacgtttttttagttcatctaacacactttgaatttcactaatttccatttttacctaccatcttttattttattgcaaaaaaagggaagctcttaactcccttttttctttattaacgactaagattttgtctaatttcagccttcatgaacaaacgagttacatcaaattcaatatttgaaatcatttcttcaaacattctgtaaccagaatcttgatattcaactaatgggttcaattgaccgtatccacgaagaccaattgattgacgcaactgatccattgcatcaatatgatcagtccaacgatcatcaaccacacgcaagataactaccttttcaaattcaagcatttggctaggatcgcctaaggccttttccttatcttcgaagttttgctcaacaatgtcataaagcttcttcttcaaatcttcaacactaatagtcttgaagtcaattgagtcagttaccttgtctgaagtcaaacttgaggaaatgaaatcgcgtaatgagtcaagacgccattccttgcgttcaccttgagtaaacattgctacttggtgatcaattgttctgtgaatcattggaattaaaacattcttcaatgacttatcagcttcaatgacctgcattctttcgccgtagataatttcacgttgaatacgcataacatcatcgtattgcaaagtttgcttacgagtatcatagttattaccttcaacacgtttttgagcagattcaacttggcgagtaatcaagcgactttcgataaccttatcatcatcattatctgataaacgatccaagaagtccttaactcgatcaccaccaaaacgcttcatcaaatcatcttcaagcgacaagtagaatctggtgtaacctgggtcaccctgacgaccagaacgaccacgaagctggttatcaatacgacgtgattcgtgacgttcagtaccaataactgccagtccaccaagttccttaacaccaggcccaagcttaatatcagtaccacgaccggccatgttagtagcgatagttacggcaccacgttgaccagcgttcatgatgatttgagcttccttagcgtggttcttagcgttcaaaactgcgtgaggaatacctgctttatcaagcatcttactcaaacgttctgaactttcaatggcaacagtaccaaccaaaacaggttgaccattagcgtgacgcttcttaatttcttcaactacagcgtggaacttagagtccaaagttggatacaaaatgtctggcatgtcttttctggcaattggacggttagtaggaatcgtgattacctgcatgttgtaaatttcacggaattcttcctcttcagtcttagcagtaccagtcatacctgacaacttcttgtacattctgaagaagttctggtaggtaatagtagcttgcgttcttgattcttcttgaatcttaacgccttccttagcttcaatagcttggtgcaagccatctgagtaacgacggccttccattacacgaccagtgaatgagtcaacgatcaaaacttcgccatcttgaacaacgtagtcgatatccttaagcatgatgtagttggcacgaagagcttggtcaatgtggtgaaccaacttttggttttcaacatcgtacaagttctttaggccaaagtgttgacaagccttttcaataccagttctggtaagtgaaatagtcttagttggccagtcaatcttgtaatcgccgtgatcttcatcatcgtcggcatcatcatcgctcttgtcttcagtcaaagtcttaacaaagcggtcagcacggatgtaatcactgtttgcttgttcagcttcaccagaaataatcaaaggagttctagcttcatcgattaagatagagtcaacttcgtcgatgatagcgtagttcaatggacgttgtaccatttgttccttgtaaacaaccatgttgtcacgcaaatagtcaaagccaagttctgagttagttgagtaagtaacatcacagttgtaagctgcacgcttttcgtctggtgacattgagttcaagttcaaaccaacagttaagccaagccacttgtaaagttgacccatttcttcttcgtcacgacttgaaaggtattcgttaacagtaacaacgtgtacacccttgccttcaagtgcgttcaagtatactggcatggttgctgtcaaagtcttaccttcaccagtcatcatttcggcgatgttaccgtagtgaagtgcaataccacccaaaatttgtacgtggaatgggtaaagtcctaatacacgcttagcaccttcacgagcaactgcgaatgcttctggtaaaagatcatccaaactttcgcccttctttaaacggtcacgaaattctggtgtctttgcttgcaattgttcatcagatagcttgctcatttcatctgcatgagcttccaccttatctgctattttttcaaactttttaagttctcgtttatcatcgttatatagtttctttaaaatatttgccattaaatcggtccttatatgtcgtaaagtctaaaaatacagattaattttaacatgattgctatcaaaagaaaaatatctcacacaaaaaaccccacgcaaaactcacgcgaggttccaatgtgtaaaagtattttaactcaattattcgttagtttcaatcaaaccgtaacgaccatcgtttctacggtaaacaacgctagtgccgttagtttctgcatcttcaaaaacgaagaagtcatgttccaacatgtccatttgtaaaatagcttcttctggatccattggctttaagcttacacgcttgttacgaacaatatcaaattcgctaggcttcttttcttcttcttcaggttgttctacaaagaaatcttgtaatcccttttcacgactctttctatttacacgagtcttgtactttctaatttgacgttcgagtttttcagaaacgaagtcaatgctacgatacatatcatccgtggtttcttcggctctcaaaactaagtatggtaaaggaatagtaacttcaactttagctgagtgatcacggtatactctcaagtttacgtgtgcaatcacatcttgattcaattcgaagtacttctctaacttgtttaaccgcttttctacataacttctcaaagcatcagttacttcaatattttctccacgaacattgtactttaacatataagattctcctttcaccgctatgcggtttttctttacaaatttattataccaaaaaatgtaagcgtttcataacaaatctaatgacaaattgaaaagctttcaattttcatttcgggaaaaccctgctgtaaacggtcccgcgcgtgatatagcgtgcgcccggtcgtgtaaatatcatccaaaattaatacttttcctgaaactatattttccttgattttaatatttttatcaatcaaaaagctttgaggcgttttaagccgctcctctttgtttttctcaccttgggcatgactacccgattgtttaatcagaagcggtgtcagcggcaaaatatcagcataaatagcaaaaattgtatcaaactgtcgtcttgattgatgttcaggtgaagtgggcacgggcacataaaagtcatagttagttttacacaaatagtcataacacaaatcttgcaatacttcccgcaaaacataatctccacgccgcttatacgcaaccatcaagtcatgaaaagcagaattataacgatataaagcatgattatgcagaatattttcgccataaatggcttgccaatttcgacaatcgctacacataaagccttgacctagttccttatcacagccagagcagcgattgtctgctaacttttcaaattgttttaaacattgcaagcaaattttactttttcgcgctgttttaaaagaaaaaagttgtgcaaattgtaccggtggagtaaactcctgctcacataataaacaagttctcatctattcatccccttgatctgcttaatactctgtcgaatattcttggtataacgatgataacaatacaaaactaagcccgtttggtcatcgtgagcccgaccaactcgacctgcaatttgcaccaaactagcagcggtataaattgcatcatctgctgcaataataattacccaaacatttttaaaagttacaccacgctctaaaattgtggttgtcaacaataagtcatatttacgatcacgaaaagcctgtactttttctaatcgttgcggatcttgtgcatgaacaccggccaatttaattttattttgcaactttttccgcaaagcttcttgataaagcggaatttcttcaatccgtggtacaaacaaaagcaaaggatgaccactttgaatgacttttttaatctcctgcattaatttaggatgaatttgtcccttccgcaaaaacggcctgataaaaagcctttctcttggtacaggcaataatccaccatgaaaacgccgatttaagcgcaaaatttctaacttccctgttttagcttccaaaagcaaatcgttcgttggcgttgcggttaaatacattcgagtcccagttgttttaaccgcatttttggccgcaaaatgtagttgcggattacctacataaggaaaagagtctacctcatcaattaccaataaatcaaaggcacgataaaacttcattaattggtgtgtagtacaaattgtcaactgctctagccctatttccttaaattcacggccatgatacttaccgatctcaacttgggcaaacgctgccgaaaatcttggaaacagctcatttaccacatcaattcttggtgtagcaatacaagcgcgctgtccttttttcatacatcgagcaatcaactgaaacaacatctcagttttacccgccccagttacagcatgaaccaatgtattttttctttgttcaaaattttgtactaatttatccgaaatattctgctgcaatggggttagtttaccttgccagcttaatcccccgtttttaacatgagaaaaagtattattactgtcttttctaataagccaatcgccctcatttgcacgtcccaagccaatacaaccacgacaataatatttaccattaggcagtcgactattaacttggctgccacagcgattacatttacctttttcaattactgggattttgcggcatccctcaaatgtgctagaatcctcttgactaacaatccattgacgacctgataatagagtcaaatcttccatatttttacctccctattatctattacgcaaaaagaggcgattattttgtcagaaaaggaaaattttttaactattaaagaaaacggcaccggtgaattaattatcaaaaagagcagattcattgccaatattgcccgcaccactactactgatgcggcaaatgattttattcaaaaaatctctaaaaaatatcgcgatgcttcgcacaatacctttgcctacacgatcggcttaaatgacgatcaggtcaaagaaagcgataatggtgagccatcaggtacggctggtgttcctgaattaaaagcattgcaattaatgaatttaaaaaacgttacagtcgtagtaacccgttattttggtggaatcaaattaggagcaggcggtttaattcgtgcctattccaatagtgtcaccaatgttgttgaaaaagtcggcgtcattaaacgcgttttacaacaagaattaatttttagcgtaccctataaccgcttcgatgaagttgatcattacctaaaacagcaaaaaatttttattgccaataccgaatacggtgtggatgttaaaattcatatttttgttaacgatgaccaacaagctaaacctaaggaagacctaactaatttattggccggacaggttacctttactaatggtgaaaaacgctataatgaaattcctgttgaagctaataattatcatgaacaataaaaagagcatttggatatttccaaatgcttttttgctacttattattttttttactcttcaattgatctggtttttcgtctcctaagtgccaaacttcaattgttggatcagttttactcttttgattaataattttctgaattacatgcatcaaaggatggtatttttcacccaataaaccaattgattccacaaaatactctaaggcaatcagcaagcctaagatcagaagccaagtgccccaagttggcgaaagcaggaataataaagaaataaatgagaaaaccaatgataatgcgtaaatagtcaataccgtctgtcggtgcgttaaccccattcgcatcagctggtgatgtaaatgatgcttgtctgcttctgaaattggctttttgtttagctttctccgaatcattgcataaacggtgtcagtaataggcactcccaaaatgataattgggaccaacaatgaaataaaagttacattctttaaccccttcagagataaaacggcgatcataaaaccaatataaagtgcacccgtatcacccaagaaaatttttgctggatggaaattatatggtaaaaagcccaataaacaggcagctaacataaaacaagcaattgggacatatagctgatgagtgtgcaagaagaaataacctacgatccccatggtagtcagagagatcattgaaaccccatcagctagcccatcaagtccatcaatcaagttaactgcattagttaaagctaagatccaaaaaatagtaattgggaaactccaccaacctagatttacttcatgtgcgatgaatggcacctttaacacattcattctgattccagctaaaaagtagataatcaatgaagcgataaaaatcccaaacattttttgtctaggttttaactccaaaatatcgtcgatcaatcccgtcaaaacaattacgcttgaagcgagtaaaatcgaaaaaatttcatgagtcggaaattgctcacgcaacagaacaaaagtaccgatattaaaagtaacaaaaatccccagtccaccaatcgttggcattggtttcttattaactcgccgggcattaggattatcaacagctcctaagacaaaggcaagccgtcgaataaacggtgtaattgccgctgaaataattactaataagaataattcaacaataattttaaacatatttggctactttccttatttacttgttctaattatacaagtagtcagtattttgcacaaatagcaaaaaagtttggaaaaattatcttccaaactttttaatttatttagcgatcgccacaactcttttttcacggataacggtaatcttaatattacctggataatcaagttctttttcaacctgattacgaatatcacgtgccaaaataactgtccgatcatctgaaatttcgtcaggttcaaccatcacacgaacttcacgtcccgcttgaattgcataagcctgcttaacgccttggtagctcttagcaatcttttccaattcggtcaaacgtctaatataattttccaaactctcgcttcttgcaccaggacgagcactagaaatcgtatctgctgcaacaacaagttcagcaataaacgacaacttaggcacatcgccgtggtgtgcagcaatcgcatttactacaacatctggttcatgatatttacgagttagttcaaccccaatttctacatgggaaccttcaatatcatgatcgatggctttaccaatatcgtgtaataaccccgcgcgaactgctaatttttcatccaagcctaattctgcagccatcgtgcctgctagcttaccaacttcaattgaatgtgacaaaacattttgtccataagaagtacgatatttaagacgacctagcgtcttaactaattcaggattcatccggtgaattcccagctccatcaaagcactttcacctgcttcatagatgtcatcgttaacttcttttctggccttatcgaccatttcttcaattctagctgggtgaatgcggccatccttgattaagcgttccatcgctcttttggcaatttcacgtctaattggatcaaaaccactcaaggtaacaacctttggcgtatcatcaataattagatctattccagtcaaagcttcaaatgaacggatattgcgtccttcacgaccaataatccgtcccttcatctcttcatttggtagatcaacaacagatacagttgtttcggcaactgtatctgccgcgctactttgaatagcatccacaatgacctgattagcataatgatcagctttagcttttacttcttcgttactatttctgatcatctcggctcgttctttgactagttcatcagataattgactaagcacaatcttcttggcttcttcctcatccaacttagctacgtcataaagcttttgccgtctagtttctactaattcttcagcctcagttaattttgcctttaagctagcatactgctgctttaattggtcttccttttgcgtgagtccactttcacgttcatctaataaagaattcttatgatctaaggtatcttcacgttgttgtaaacgatttttctcccgagctaaattatctttcttggaatttaactcatcctcggtcttttgcctaaaatcacgaatttgttcttgagcttcaagaattttttcttttttagtattttctgcactttgcttaacagccgctgctgcttgcttttgtgcattaacttcagcttgtgctgcagcaacctgtgccttagcatcagctaaaatgtggtcagcatcattctgggcattttgagctttttgttcccaagaatgcttgcgaattgcataaccaaccactgaacccaccaagaatgaaacaatggcagttgcgacgggaatcataattgttaacatattattcatgattactatcgccttttttagaattattcacacaacttttatgataaagaacctatctgttcatgtcaattaaatcaaaaaaccttggaaaataaatccagggtttttgacataattatttagcttgttcagactttttatctgtagcagcttctttttctgtcttggcttcttcgcgcttctccttgatcttttctggatcttcacgatcagcaattgacttttcatcaatcccgtaagcttgacgcacttgcttttggatatcttgataaatatctggatgctcttctagatacttcttagcattctcacgtccctgaccaattcgatcactcttgtaagagtaccaagaacctgctttatcgataatgtccttatcagcagccatgtccagtaattcaccactttgtgaaattcccttaccgtacataatgtctacttctgccaccttaaatggtggagcaaccttgttcttaacaactttaattttaactctgttaccaagaacatctcctgattgcttaatctgttcagctcttcttacttccaatctaatagttgagtaaaacttaagagcacgaccacctggggtagtttcaggattaccaaacattaccccaactttttcacgaatctggttaataaagatggcaatagttttggttttagaaatattacctgataacttacgcaaagcttgactcattaatctcgcttgtaaaccaacatgggcatctcccatctcgccttcaatttctgctcgtggtactaaggcagcaacagagtcgactactacaatgtcaattgccccactggaaatcaaagtatcagcgatttgcaaaccttcttcaccagtattaggttgtgacaaaattagtgaatcaatatctacacctaaagcttcagcgtaagcaggatccattgcattttcggcatcaatatatgctgcagtaccaccacgcttttgcacctcagctacagcatgaagggctaccgtagtcttaccagatgattctgggccataaacttcaataatacgaccacgaggatatccacctacaccgatagcagcatctaaagctaatgaacctgttggcactgttgaaatttgcgtatcagctttttcgcccatccgcattacagcacccttaccgaaattcttttcgatttttttaagcgctgcatctaaagcagcctgtttttcgtctttggccattaatgtcctcctatttttcgtacctaataattatactttgaccgccgtccaatttgcaagagaaatgcaaacgaacgttcaaaggattttttaccctctattatttattacgctaaaaatcgccattatttttttacaaaataaaaaaagaagcaaatgcttctttttaatcattcttgacttaatactattttacattgagcccttgaatacgccccatgattggtggaagtaatcgtaacctgagtaaatagtaaagatcaacgcaaggtaaagtaagatagtaccaatgtggaagaagtcaccaatcaataagaaaatgattgataacatttggcaagtagtcttaattttaccaggcatctttgctgctaaaacttgtccttcattttctgctaagatcaaacgcaaaccagtaacagccaattcacgacaaacgatgatagctactacccatgctggagcaagtttcaattcaactaagaaaatgaaagcagtcatagttaacatcttatcagctaatggatcagcaaacttaccaaaattggttaccatattacgtgaacgcgcaatgtgaccgtcaaaccaatcagtagccgaagcaacagcaaaaacgatagcagcaataacacgactccaaacaacagttgagcctgctgcttgaacactagcattcccaccaaaaatgatgattaacataaatactggaatcaaaaagattctaaaaacagtaagtttattaggtaaattcattctaacactcctagattttaattgttgttattatttccaccatcattgccattgttagtgtctgctgatgattgagtagtagatgattgttgagtttgactactttgttgggtttgttggctactttgagtagtagtagatgattgttgacgactgctttgacgagtagcactgctttgagtagttgtacggctttgggtagaactactattggttgtattgttattagtagagcccgtattattagaactactattattttgactagtagttcccttagccttaccaatcaacaaagtaattgtcctgtacgcattgtttgctgtatatgggattttcttacctgcaatagtgattgaagtaccattatcgttgcctaaagtaatcactactctctctgcattgcttggcaaagtcatagtgtgcttttgattagcaagtaaagttgattgccagctattagcattaccattgacttgtacacccgctgaaatattttggttttcaccagcacgcacaactaggcgacggtttttattcaagccagtaactcggtactcattgtcactaaccttagtaaccttaactttattgactactacttttttagctttcttagaagatgacgatgatgacttttgtgatgaaacagttacatcattattatcagcttggttcttttgaccacctgaagaaagacgagcatacaaaacgtacactacaagaattacgataattacaccaagtccgatcgcaattcgtggcaagtaattcttccacaaatttttcttattgtcggtggtttctcgtacttcttcactcttattatcaatcgagttttctacgtactcatctggcttagcttctggtacatcatcgtggtaatcacttaataactccttaccatccaagccaacaacttgtgcatattgacgaataaatgctctaacataaaaatcgcctggaagtttatcaaattcattcttctcaatcgcttcaagatatctgctctgaattttagtagctttttcaatatctgcaattgaaagtcccttagcctctctggcgctctttaatttatctccgatatctgccatatttacctcttcaaattttaatttatcatgttgagtataccataaaattctcattacaacgtcttagttataaaagccatccacctgtaacataaattgtctgtcctgttaaataactactacgtcgatctagcagtgttctaacccagtatgaaatatcactgccattggcccaacgaccaactgggatttcatcttttacctcttgaatcgtatcctcagaaaagaatgcattcattttggttttaaccgcaccaggcgcaattacattaaccgttaagttattggaagcaacttcacgcgcataagcctgagcgaacctggttataccacctttagttgcactatagacgctttctaatgcactacctgcaccaccatagactgagcctaaataaactatacgactaaaatctcgtttcatcagttgtggctctaacaatttagttaacttaattggcacagtaagattaatattaatcagatcagtgatatttgctaatttttcatcacctaaaaaaccatacttagtaattccttgagcaaaaactactgcattaactggcaacaagtttttaacaaaatctgttaactgtgcatcccctgtcgcaaaatccaactgtagcgacataaaatcctggtcaggatgcttagcaaacagctcttgaactaaattttcagctttttgagaattagaatgataatgcaagtataatgaccaaccggcatctgccaaatctcgacaaatatcttgaccaataccgccagttgcaccaaagacaattgctcgcttcaactttatcaaccccttacttgttttctaagtaagcagaacaaagttcactgtctttcataatcttttggcagtagtcataaaactgatcaaaattcattgcctgcaatttagctatattttgtgctaaattttcatgatctaaattttcttcaattaattcaattgccaaataagacagatcattacttgtcctagcagtgcgtgctaaccattctttcttttgcaaaatgaagttttgtctaataaaacggtattccgctgaatttttcttaattggttccgtcaataccctctttatttctgcaattacttcttgagcttgaggacttacaccaaaaatagtagcaaaatcgccctgcctggtgtaattaacagaaatctgcagcgaatccattaacagctgcttttttctcatttcttcaaaccatggtcccattgcacttagttttgattctaacattatttctaacagaatttgagtcaaatcaaagcttgataatactttcttaaagtttttaaagcgaattcctaaaccaaaggaattagaattacctctggctggcaagacttgattatgtaacatgcgaaaactaacttgtttttcagctgtgcttttacctttcccgtgcaaatatttttgctgcagctttcctacttgccgcaaaatcgtttgcacttgattatcagaaaaatcaccgcaagcaacaaattgcatcttttctggcacatacttagcctcataaacttgggtcaagtttttcactgtaacttgattaattgattctttcgtacctacaacttcgatccctagattagaatcaccaaacatatcatgcataatcgcattatttacgctccaagttgggtcatcctgatacatggccaattcttgttcaataatcggagcctcttgcgcgatattttccttagtaaaatacggctgccctaccaattcaaacaagagatcgatcattttaggcgtatgctcaattccactacaataaaacattgtttcattaaaagacgtgaatgcattaacgtcagcaccaatatcttcaaattgcgttgacagatcaccatcttttttggcaaatagcttatgctctaagaaatgagccgaaccggcaaccttttgtggatcactactaccaaagtcaacaattataccgaaaaatcgttgataaaaatgtggctttaaaataatttcggctttaaagcctgactgatattcttttttgataatttttggtgtcatcattttaaaacataactttcattaaagaataaattttgtacgaaagctactaactgcttaggtgtagctctcctaattgcattttcacgatcaaagtctaaatatcccgagaacaattcatcacgcaacatttgacccatctgccagttttgaccgtctagaccaatcttcatattacgcaaaattgcctttttagcctttttaaataaatcatcttctacttcgccctgaactagtttacccatttcggataaaataatttttcgagccgctgcaatcttactaggatcaagtcctgcactgactaaaaacaaagaattattggcaaagcagcttgcttcaacattataagctgctcccaattgctcccgaatttgcgtaaataatttagatgattgatcacctgccaaatattgcgataataatattcccattacttgaccgcgataatcaatactttgttctaaaccaaagcccattaacaattgagcttgcacatttccttgatcatcctctttttcaatcaactttcttttagctggaatagttagactagctgtttgaaatgatttagttaaaccagtttgttgaaacatagcctgagctaatttagaaaccagattattatccctggtcattcctaaaatttgcattggtacattagctaaattacgccaataatgcatcatagtcgtgctagtcgcagctttgatttcatctagtgagccaataaatgtctccgcataatcaggttgatcctgataccacaatttaaaaaactgctccaacgcataattagatggttgttcaatcagttcttgatattcttctgctaattgacgtttagcatattccaccaaaggttctgcaaaattaggttgattaactatttgtgcaatcacattaagaatttcttcatacgtataatgtggatccaaaatctcaatcggctcaacaaaattggcataataagtcaaaagtatttctttaccaaaaacttgtggcataatctccagctgtaaatcatataattctgccaatcttttttgttgtaaagcaagtgacggataacttaagctgctattcatctgtattcgcgctagcaaactagcataagctaaattatgtttagtcagcggcaaacgcaaaaaacagccaatagcggctgttgtaaactttttattttttctaattgcaatattagttgtgagcattgtttgaattaccttcattctttattggtggcactaaaacttgtcgtggcttagagccttcagatggaccaacaatccctttagcttccatttcatcaacaattctagcagcacgattataaccaattctaaacctacgctgcaacattgacacgctggccgtctgttgacgtcgtactaaatcaacagcttgctcatagaattcatctgctggctcatcatctttactatcagcatttgatgaattttcaccttttttaggaatcattgtctcatcataactaacctcttgttgcttcttaacccattcaattacgcgttcaacttcatcactagcaatataagcaccttgaacacgttcaggtttagatgccccaattggcatataaagcatatcaccacgaccaagtaatttttctgcacctgtttgatccaaaatagtccttgaatccactccacttgatacagcaaaggaaattctcgatggtacatttgctttaatcaaaccggtaataacatcaacacttggacgctgagttgccaaaatcatatgaattccggcagcacgtgccatttgtcctaaacgaacaatcgcgccttcaacatcgtgaccaccaaccatcatcaaatcactaagttcgtcaactacaactagaatataaggtaacggcttcatcactggtttagttttatcacgattgttttcagcaactttttgattatattcactcatgtttcgcacgccaccagccgcaaatagcttatatctgcgctccatttctttaacaactttgcgcagtgcatttgcggctagcttagcatcggtcaccacagggatcaataaatgcggcacaccattataaactgaaagttcgaccatctttgggtcaattaaaactaatttaacttcttcaggccgcgccttcattaaaatactggctaaaattgtattaatcgctacggacttaccagaaccagttgaaccagcaatcaataggtgtggcatcttagctaagttggcagaaataatgcttccagttacatctttacccaatggtacatccatcggatcgcttttggctttattatcttgatgttccatcacgtctttgaatgaaacaacagacgttgctcggttaggtacctcaattccgataaagggcttaccaggaattggtgcttcaattcgaatatctttagccgcaagcgccaaagccaaatcatccgctaagtttacaattcgacttaccttaacgccaacagctggctggacttcataacgcgtaatagttggtcctaaaatagcttttttaataatcaccttaacgccaaaactcttaaacgttgattgcaaaacttgggtatttttcttaattaaatcacggtcagtactctgatcagtcgatttaattggatcaagtaagcttaaaggtggcatcttataagctttattgactggcgcatcagtttttagttcaccatgatcgacatcggctaattcctgctttaacttttgatcatcttccgcaaaagaatgtgacttaggtagttcctttaccccgtcatcatgttgtggtgcaatttgaatttgcggttctggatcaggtgtggtctctggctcaacttctacgtcttcagccgtcggcgttacatcgtcatcagttggatcggcagggtcaaagtctgctacattaggaaaaatcggtttatcgtcatcaactaaatcttcgtcttgttcctcttttttctgacgccgcttttccaaaacgtcattatatttatctttgacctttaccccagcttctttattctttttgatgaataattgactaactgtctggaatttttcgataattgttctaaatttaacatcaaaaaacatcaaaattccaattggcagcaataaaatagcaaaaacacggacaccgatttgccctagtagtggataaaaaagttgataagctaatgaaccaattaatccaccaccaatgctctcagtgactccagcacgaccaaactccgcggccattgcatgccaaaaagaattcaggaaattactgttaactaattcatgttcaaaatacaagttacattgaattaacagaattcccaaaaaagcgattgctaaccccaagctacgcttaattgttaagtgaatcggttgattatagattaaatttactaggccaaaaagtcccagtaaacctgccgcaaacaaataagaatccccgaagaacattcgaatcaaatttgcgatttgcttacccaaaataccgaaacggacaaaagccagccccgctattaaaatcaagactaaaccacaaatactccaattaagattttgctttttgtttgcttttcgcttattgtagctctttttggcctttctttgtttcttttttgcaggcatgtactcacctgattaattatcgaattcagccttgaagttcaagttaaccggctgacccaaagttaattgggttgtttcatagatcaaggtctcaagttgctcaactaatggtcgagttagtaactgccaatctgaattactaatgtcagagccatcaccatggtaatcttttaattgcacgatttgatgaatcaagccgcttgcttcaaacatagctggtgcaggaattacatcatattgaatagcaacatcatagtaactaccattttcttctgaatgctcatcgtcaccgctaacatttaattttctaattcctggtctaacgtcactaattggtttggtatcttcatcaactaaatcataatgaaatgcctgtacgataatatctgtctgtttttcaaaatccattatttattctcccctagattacgttcatatctttcaggacgatcatagtcatcttttaacttgtcattttcataatgatgggttgtttccatattaggaaaaccttgctggcgtaaagcttctagcaaaaccattgctacagaattagacaagttataacaccgaatgttatcagacattgggatacgtaaattacggtcatagtattcacgcataaaagtttctggcaaaccagttgtttctttaccaaaaacaaagtaataattcttgttaggatcagtataatcgacttgtgcataattttttgatgagaatttagaaattaaatacatctcatcattaggccctaaagtcttcaaaaaggcattcaagtcatcatgtctgcgtacatcgaccttatcccaataatcaagacctgctcgcttcatttttttattatcgatttgaaaaccaagtggttcaatcaaatcaaggacagtgttagtccccgcacaagtacgagcaatattgccagtattagctggcatcaatggttcatacaaaactacatgattagtcattcaaaaaactccttatcaaaaaaagcgtagcttttaagccacgctttaaaactatctagtatttattcgctttcgtcatgatctgcatcccccgtggtcgaagaaacagcattctcttcaaagagtttagactctcttcgataataattgtacacgcgagacacaataatcttcaagatcgcataaattggaataccgaaaactacaccccataagccccagacggcactagcaccaatcaagagtaaaattgttgtaattgggtgcatttccattttattccccattacccatgggctaagaattcttgattcaattgtttgttcaatagcaaaaacaattaagaccttaattaacattgaacctgaagtcataattgaaattacaattacaggaatcattgctaatggtgtaccaaagtatgggattaagttcataaacccagctaaaattgccaaagccacgccatatggtaaaccaattagaatgtaacccaatgagaacatcacacctacccaaaaggcaacagtaatttgaccacggacatatgaagcaacagcatagttaatatcatataataatttgctaaaactaggttgccatttttcaggtgcaaacttggtaatatatggccgcagttgatgaccatcttttaacatgaagaataaaataaacggtgcagttaacaaagtcatagccaccattgtaataatgctgacggcagatgaaatattgccgatagttgcattgatggtactttgtccagacttaaataaggtcttctgcgtattatcaatcatgcctttgatactgcctttaaatgaatgtaaacgcggatcttgcaacgcattttgtgttgcattaaccgcatcattccaaatatgaggccagttctttatcaatgaattaatctgattctgtgcaattggaaccaagatattaataatccaaattaatgcgacaactactagtaagaataaaactataattgtcaccactcgcggaatcttaaattttctttcacaccaatcaacaaccggattcatgatatagtactgaattaccgctaataataatggcggtaaaattgcactaaagaagatccaggcaggattcaatacaaaagatactttattaaagacccaaataattaaaaagaatagcaggacgtttaataaaacaatactaaaacgattatctaagaaccattttttaaaaacagttccacccctatgttggttattttccatctattcatcctaatttttaaatgtgttcataaacaatatcatcatcaaccttaaaattaggtaatggttgatcaatatccggatcaaagtagatcgcattagcaagtggcgtcttagaaacggtacggttaaagaacaaggttgcgtgtcccaatgccttcatgttgctctctaccatcggaccaacatagtttgcaacataggtttgaccatcaacagtgattgtatcaccttttttaaaaacaaaaccactaactggcgtctcagtactgaatttttgaatgacagaaacgtcttccaaatccttattagcaccctcgccaaataaaattaccatgccatctttattatcgacggcctttttaccaatttttttaatatttgcaatccatttcataatataatctctccttaaaaataattttagcataagaaaagctgcttaaaaacttaagcagcccaaaatcggcgattattttttgctcaacaggaaatcgtgtttttaagcgtctaatccgctttcatgctatactttattttagacttatttttatttagagatggaggcccacatatatgaaggttttaatcggaggttacaccaaaaaaacttccaaagggatttatgaattacctattaccggtgcagcaaatgatgcccgtttaggcaaagctgagaatattattagcgttggtggtccaacttatttccgaaaagatggtaatttaatttttactgttaataacgctggcgataaaggtggaatcagcgtctttcaattaagtgatcaaggcgcaaacgaagttgaccactatttaactccaggctcttcgccagcttatgtaggaattaaccgcaccaaaaagttgatttacattgctaactatcatactgctgtcttgtccgttttccgctacaacgacagtggcaagctcgatctagttgatactgtaactcacaaagatgaaacgttgggtccgcgtcctgaacaagttgacggtcctcaccctcacttctttgatgaaaccccagctggtaacttggttagttgtgatctaggcaatgataccgttgatttttatagattagaaaatgatcaattaaaacacattgctcaatataagtgcgaaactggctttggtacacgtcatatcgtcttcagtaaagatggcaattacttctacgttgtcggtgaactttctagtcaaatcaatgtcgttaaatttaacgaagacacttgggactttgaaaatattgctacttataagacaattcccgctgattttactgaccataacggagctgctgccttatatattagtcaagatggcaaatatgtttacacttctaacaggggacataattcaattgctgtcttcaaagttaacgacgatcatactttgagcctggttcaacgtgtatccacttttggtgacttccctcgtgattttaattgggataaagatcagcgctacgtcgttgtcgctaatcaaaatacagataatgctactctttacacaagaaacgctggtactggtagcctaactcctattcaaaaagaaatttccgtaccagaaggcactcgcgttcttttcaccaaatagtaattaacattagtaccaaagtcatggcgcaatagaacgtcatggcttttttattcctacaacttaaagtaaaatagaaataaatgaaacaaaatataagtcatgtggtaataagtcaaatgaaaggcgatgatatttgttctttttgatcataaatttgagtatatgaaactaagccttggtaaaggttgatttttttaatgttaaacttttgtttacttttaaatttagaccaatttttgaaattaagacctcggtgtcctgtacagtttgtcatctttgagcaatttaaagataactcgtactaattttcttgcagttaatgtgcaagcacgtttatgcggcgagtagacagcttcatcatacttcttttggtaatattttttgaaaacaggatcatgtaatcttgctagattggcagcttcaatcaagtaatatcttagatatctgtttccagtcctggccattggagtatgttcgttgctgtgatctcccgattgatattgattccaggttaggccggcatacttagccagctgttcttctttatcaaagcgatcgatacttccgatctcagcgataataccagctgtataggttttgccaataccgggaattgattccagaattttgctttctggtaatgcatcaacgatacgatcaattgctttttctagatctttaatagattcattaaagctttgaatcatgttgtaatgaacagaaagcactgcatcaattgaatcagtcattactttgcctaagcgatatgaacctctaacagctttcttaattgctttagccaaggtatctggatcggaaaagcgtcctctgcttttaacctgtaagtaagaaattaagtcttcggtaggcatatccgcgatctcatccagagttttactatcggttacaatagacatcattgtagcaccgaaaagaggagtattaatcttatctttatcgacagtgattagtttattaacccgataatataaagcttcaatgaagtgctgtttggtacgagtcagttcttgaactaattcatatctggtacgcgttaaacgctctaaagcaagatagttgtcttgtctggcaatgcttactcgataatgtccaaagcttagatacaaagcaatgtaataagcatcgagaggatcagttttactttcttcaaagactttatgaaacctgctggtttctttggggttaattacatcagtctctacattgagcttttgtaaatcttcgtcattttggaaaaagtaagcaggatgaaaactgtaaatagatgtagcttccatgccaataatgatttgatcatagtgtttattttgagctagatctaaaatttgttttttcagttcactagcaccataaagatcattgacaaagctatcgttaattaagcgtttgttttgatcttctgaatcaagtgcaacgacctgtaaatctttagaactaacatcaataccgacaaataatttcattggaaatggcctcctttctttcaaatttctgatcatagattttgatcttcacatgttaacccctaattacagttcttaagttcaatctcgccagtataagtattcactggttgcttctttgaaagctgcacctaatcccaattgctcaaggactagcaaaaagaagcaatcaatacagcatgtgagttagagcataaaggaactgtctgggtggcagacttataaagcagacaaaactgcaggaggtgataacctagaccagttgaccaaagccaatgacaattagaggctaacatgtgaagatcaaaaagcaaatactaatttgattaattatcacaatatgactaattacaatttatataatacgagaaggtgacaaagtgaaaagaaaaataattcgaatattacttttcattcttggcgggatattagggttactacttctgtataaactctatttaaattaccgtcctgaattgaatttattacttcattttgatcaccataatgaagaagtactcgttaacatggtccgtagccatggtattgaagacttagcctttttatttttacttaatgcgatctgtgtagcaattcctggcttatccaacggaatcttttgtgttctcaacggaatcctttatggccctgcctggggatttattgttaattggatcagtgacattttaggccaaataattttaatggaacttttgcaaaaactctatgacatgaaaaagatgtctaacagtaaagtttataagttattgactggattaaaatcaccaatgcttggattaattattggatatatgattccatttattccgagtgcgacagttagctatgtcaacattatgattaataaggagcaacgtaaaaaacagctaataccaatcattatcggtgtcatccccttcgcttacttatatgcttatggtggcgattcaatcttgcacttagacggaacacgattgattaaagttgtaatctcattcgttgtcattgctttaattgcagtagctattttgcttagtctgagagcaatcaaaaagcgtacaaaaaaagcttgaatttactcaagcttttttattatgcctagcatatttaaactaagttagcttcttctaacagttcttcgacccaagttctcttgattttcttcatccctgttttgagagctaacttctcaggtaatggcatctcttgatcaactaatttcttcttgtcagacatgtagtacatcgcacgaagcaattgacgaatatcataaattgagtcaaatacttcaggtacaccacggtcaacgttaagcaatgtataaacagcttccatggcagttctgacagaatattcggtggtaaagacagtgtctctagttggtgattcggcaaaattgccaataaaggcaatattaactgatccttctggaacaacatctggacggtccccatcatgacgaggcataaagtaactagtgatatatggcatgtaaactggtacggtattcatattttcttcactagccaattcgctgatttgactctctggcacgcctaagtgatagagcatttcctcggcaatttctttaccagtacagtcaacgactctcttcttgatgtaattaccctcagtatcagaatacaaagcataaatccaaacaacgatttgatctggattctggctcttaaagtgaggttgacggtgaatagtaaagctaagttcccaattagagtcaacaacagtgataattccaccagtattaactttaccatcgtaaaggctgcgcttagtcaagcgttcaaagtatggagctattttcttattttccaaggtagctgtagctgatacgaaccaactacgctctggcaagttttcacagaagacatctggatgaccaaagtcaggatcttgtttagccaaattttcccataatttccatgaagagcccttgtcgtgagtaattggtgctggggtattttgatcaccataagtagaactttcagtgattgaaccgttagtcacaaagacaatatcatctggggttaaatcaatatcactttgctcaccattcttggtcatcacgatcttcttggcaaccttttgcttgccctcatgatcaacaacaccacgttatcaacgtgacaatcatattcaaattgaacaccgtgatcttttaaatatgccaaaagtggcttaaccatggactcatattggttatacttgttaaacttcaatgcggtaaagtcaggcaaaccatcaatatggtgaataaagcgcattgcataacgccgcatttcggctgctgagtgccatttttcaaaggcaaacattgttgcccagtatgtccagaaattagtcttaaagaagtcatcactgaagaattcttcaattgtttcaccttggagttccttttccggtgtcatgattaacttcacgatttcattagcgcacttacctagaccatattgaccatcacttggtaagcgatcaccgcgattataaattagacggcaattggatgagttaggatcttctttatcaagccaataatattcatctaagtatgatgcgccagggatttccaaacttggaatcgatctgtacatatcccacaaacattcaaagtggttctccatttcgcggccgccccgaaccacgaaacctgcattaggacgcttagcaccatcaagtgaaccaccagctacgggtagctcttctaagatatgaatattttcacccttcatttgtgcatcacgaactaaaaagacagctgcagaaagaccggctaaaccactaccaataatataagcagattttttatctacgcctgcgggctttttggcatccgcaaaagcctcataattaccattggaatagtacataaagatattctcttttctgtataagtatagtttttaacattacactttaattataaagaaagcggttactagatgcgagttttttagaagttttagctaataactttagaattctttattaattagtttctgccacagttcttgcatatcttttggatcattcaactcaattgttttacatttttgttggctaaatggatccggaaaatttaaataaaagcaatttaaggcttggcgtgaaaacccatcttgaattccatataaaggatcaccatataaggggtgtcccagataagccatgtgaacacggatctgatgggttctaccggtaagcaagcgtaactctaccaagctagcacctgtaacctgatctaggactcgatacgcggtttgagcgtcctttccatctgccactaccgcacgtttaaccccactaccctttttgccaatcggttgatcaattaaaccagttaactcattcggagcaaaattgccatgtacaattgcatgatattttttgacaaatttctccttgccaattttactaaaacgagcatgggaaattgcatttttccccaccaatactaaaccagatgtatatcgatctaatctagtaataacatgcggcttcaaatttttctgtcctttttgggcaaaataacccaacaatcgattgaccaccgcatcatcatcttcatagcgtgagggaattgacaacacacctgcaggtttgttaactacaagataatttttattctccaacacaattgatactggattattcgatggctttaaaaaatcatttttcttttcttcaccactgataaaaatcacttcatccccagcacgcaaattaaagctagtatatcttcttttatgatttactaaaatcatgccatgatggtgtttagcattgtttaacgcttgatgcgaaaaaccattttttaacaaaaaaggacccagctttttggggtctctttcttgcacaattagtttaaataaactagtcatttttttcattatctccaataaacgcattttgtacgcgtgaccaaaaatgatggtggccaaattgatcaaactgaatcgaatgccgcgaaattcgatattcaatcttcttagcattacgtacatcaattcttgctccatcaactgtcatcacaaaatgatctgcattaggaacaatcgaaatccattgatcaggcgcaatcacaattggtgatgacaaagttctaaaaactcgattattaattgaggcaatttcagtcatttgcaacgcttttagccggggatgaattactgcaccacctagtgatttgccataagcagtcgaacctgttggtgttgaaacgcaaagaccatcgcctcgaaagttttcaaataattgatcattaatgtacacatcggcctctaatgtatgtgaaactcttttaactgctgattcattgacggctaaatggtaatgagtttcacctgattcagtgagcatctttatttctagtaaaggatacttcgctggttcacccttggttactgctaaagcatcaaccattttttcaatatcatagttacgccaatcagtataaaaacctaagtggccagtatgaatcccaataaagcgcacagaatctacttgattttcatagcggtggaaggcattgatgagggtgccatcaccgccaacagtgatcactacatcaggatatctagcatcaaagataaagcccttttcctgaagcagcttcttaagctgcgcaactgtctttaacgtttcatcgtagttattatgcgctattgttactttcataatttttctttgcccttatttttggtaaaaattttctgagcttcttggacctcatccttaattgacgacatttcttcgtctagtctataagcggcttcagccgttgattttaatctagctgaaatgtcatcaggatagacaccttgatatttgtaatttaaagtatgttcgacagtagcccaaaagttcattgccatagttctaatctgaacttccgcaattaattttttcggaccttctggtaagtaaaccgtatagttaatcaccatgtggtatgaccgatatccactcggcttagcattttgaatataatcacgctcctcaacaacttccatatcatctcgagcatgaatcaaatctactaccttataaatatcgtctacaaattgagtaacaatcctaatccctgcaatatcttgcatatcagtctcaatgacatcaggactaattactcgccgtttcattttttccttgatagaatcaactgtctttacccggccaattacaaattcaataggtgaatgttctcccttagttaaaaagccttgtctaagggaacgaaatttaacctttaactcgcgaacagcttcgttataaggccacaagaagttatcccaatctaattccatgagaaaacattcctttcttaagcaaacaaactcattttaccatataattaagttaaacagttcggaggaaaaacagatgagtaaaaatcgagaaattgaagcaaaaattcttttaaataaaagcgtttatgatcagatcactgccgcttttccaatcaaaagtgactttacccaagaaaattattattttgatacagcagatgatttattaaaaaatcatcaaattagcttgcgtattcgaatctatgctactcacgcagagcaaacaatgaaggtaccggatcctaatcctgtacaaaagaatttccatgaagtaattgaaattaatgataaattaactcacgctcaagctaaaaaattagtagcaaaaaagcattttaaattcactggtaatattggcgcatatctagataatcattttgccaatgaccaaaaaaagctacatcttttcacctggagcaaaacccgcagaattttgatgaacgggccacaaaactgtgaattaactctagatgctacgtcttatccagataactatcaagattttgaattagaaatcgaaaatactaatcctgctttaattcaaacagtattaactaaacttgaacaagaatatgactttgaacaaacggctgctaacactaatcaaagcaaaatagctcgtgcaagcgctcaccaaaaatagtatatagaaaataaggcatattttttgtcacttattttttttcttgctaaagtaactaatagtaaatcaccaaagaggtcgagattatgtttgagatttttctattcatcaatccaatagggatttattgttatgacactgaaaaacagattcgtaaaaccgttgatgaattaggggtcgacgtttgttatcactatattcccattgcaaatgtttgtttaatcaatgatgatgcgattcgccgacgcaaagatgaccagaagttgcctgatattagtaatttttctagagcaacttatgaagcattagaaaattaccacgcgattaggctggcctatggcaacaaaaaagcccgtcaatacctgtatgaattacaaaaaaacttgagcaaagatgcttcagcttatacacctgagctgcttaagcggatcgcaaacaaattacatatcaaggatgcggatattcaggcaatcaaacaaactgattacctgcgtacttctattgaagaagatcaaaaactagccaaccaatggaatattaaagctactcctaccaccgttatctttaacgaagacaacgagcaaaatggagtattgctagagggaccaatcaatcaacaggatttagttaatctaatgcttccagattgtcaaaagtgtttttcagactatttacctgcggagcatcatttacgccttatctaaaggcgttttatttttgcaaaaaatcactcacccgatctctttcacctgggttacgccaagtagcaaaaactttatcaggtaaatcatcaagagttaatttgcgttcataaagcatctctcctattttcaatcctaactttgttttttgcataatttgctggcgtaaatattttctttgagttgcaatgttcaaagaatattcttttttgaatggcttaaagcgccaaaaatcttttatccccaattcatcaaggacaaatgatttactttgataaaccaatttattagctaccggttcttctaaaacattatattttaagcaaaaacgatttctctgtggattaatttctaaatagtaattcccccaagctttattttgtcgaaagaaaatcaactgtgtgcgtttcaatcgccgtttcaaatagtgtcgctgtcccacaatccaaatatcttttacaccaattttttgataaagctgatgccgatggttaaattcttgttgactcaacggcgcacattgaacttcaaacgctaacttagcagttgctaagacatctgcacgcaattgtccttcagctaatggaatctcaacttctgccggaaaaccagctgccgtcaaagctgacttcaacagcattttcgattggtgatgctcctctttttcacccattaaattactgtacttcacaagatgcttaaaaaaggctgctttttgctccgacataaccaaaatcacttttttattgcaatgtggacagtgataattatcacgattcaatttcttttgccttgcattaactaaacatgcttcgtcaactgcaaggactaatttcttatttaacatggctgcatacatttttctcacccatgttttattacgtaaaaaagagacggaattttgtcccgtctctttttctttaaagaatcttaataattagctgcttttaaaaagtaatgtcgaatctggcctaaagcattttgcatcaataagcatttgcctgtttcttcaactacacgcatcttatcactatcgaccttaaaaccaaattcgttggctattgtccacgcatctgctggtttaagctcctcatattcttcatcaagaaatgccaaatttaagaaatattgtccatgcaagtaatacaagctagaagctaaatcatttgccttaaggttatcagctaattcaattagactacctaaatcatcaaaatagtaagcctgagtcttgcgcgatctccaatcagttggctcattgtttttatcatcttggttaaaaaagttgtgagtagctggtccttgaggagccgaatttgaattcgtactctcctcatctaaatcaaagaaactttttgaatcatccgaattcgttgatgattgctcatccttaggaaagctatcacccattagtttccttaaattctgtgcatcgtccggcttaactttggtgatcatcaaatctaatcccccattattaggcattacttgaaatgatactggatcaccattggcaaattcatggtcttcatcgacctcatcaagaattttatagaagaagtcttgaatcttttgtctattacctaataaatcaagcattcccatcccacgacgagccaattcagctttatcaattcgaactctgatagtattcttatcaatatgatctacctgcacaggatctcacctccatgaattaatatatctattgtagcgtatttttcgtttaaaataaaagtgttagtctcaacaaaagccttaactaacacttttcaatcattttataaatctgcaatcttttgtgcttcagccaattccaaccgacgaacttttcgtggcaagaatcgacgaatttcatcttcattgtaaccaacttgaagtcgacgatcatccataatgattggtcttcttaacaaactaggattcttttctactaaatcaagtaactgatcaattgataaatcgtctaaattgattcgcaattgttgaaaagctcttgagcgggtagaaatgatttcctcagtaccattttcagtcatccgcaagatctttaataattcttttttagtcaatggttcagaaaaaatgtttctttccttgaatggaatattatgtttttcaagccacgctcttgccttgcgacatgaagtacaactaggagagacatataaatctaccataaaaatcacgctcctcagaacaaatatttgtatacgtttctttactcatagctagtataccatataagcttctttttcgtaagtgcttaatttatcgtttacctctgctatttacttaatactaaagataaaacgtgaattatttgtgaagatttcgttcgttttgtttaaaattattaaaaataaaaaaagagacatcacagtctctttttgcaaattaaaactacttgttcaattttttcattaaattattaactaatttttcgttgtcttcagcagtttctgatacataacaagcttcgttagctaatcccttaatgtcagcagtgttcaatttcttcattaagcttctgatacgcaaaattgaagttgcactcattgagtattcatcaagtcccattgaaagtaagattgggaacatagtgttatcaccagcagcttcaccacacataccacaccaaataccgttttcatgagcaccatcaatagtgtgcttaatcaaacgaagtactgatgggttatatggttggtacaagtatgacacattatcattaccacggtcagcagccatagtatattgaattaagtcattagtaccaattgagaagaagtcaacttcctttgcaaattgatcagctaaaacggctgcagcaggtacttcaatcatcataccgacttgcaagtcatcaccaatcttaacgccttctttagcgagcttatctttttcttcagctaaaatttgcttagcttcacgtaattctgctaaagtaccgatcattgggaacataattcctaatggaccgtatgcagatgcacgaagtaaagctcttaattgagttctaaagatatccttgtattgcatagaaagacggatagcacgaacacctaagaatgggttcatttcttctggaagatcccagtaatcaaggtgcttgtcaccaccgatatcacaggttctgataatggtttgtttaccattcataccttcaataacttccttgtaggcatcaaattgagcttcttcagttggaaagtcactagagtccatgtacaagaactctgttctgtacaaaccaatggcttccgcaccattatcctttacacctggcatatcattaggcgtaccaatgttagcagcaatgataaatttcttgccatctgcagtaactgatggttcattcttaagcttagcccattctgccttttgcttaaggaatgcttcactcttttgcttgtaatcagctacttgagcgtcacttggatcaataattgcatccccgtcaagaccatcagcaattaacatatcgccgttcttaacatccttagtaattgagtcagtaccaacaacagctggcaattcaagtgaacgagccataatagctgagtgagctgtacgaccaccaatatcagtaacaaaacccttaacatactttttgttaagttgagcagtgtcacttggagttaagtcgtgagctacaacaattacttcatgatcgattgaagcaggatttggtaattccttaccaagaaggtgagccataatacgctttgaaacatcacgtacgtcagcagcacgttcttgcatgtaaggattatctgtcatcccttcaaaaatagcaataaacttcttagcagtctcatcaagagcagcttctgcgttgatctttgaatccttaatttcattctcaatggcaccagtaaattctgggtcatttaaaatcattaagtgtgcttcaaaaacttgagcttcttcatcgcccaagctttctttagcaatatcatgaatcttttcaacttcagcagttgaagtcttaattgcatcgttgtaacgagctacttcagcttcaacatcagcaattgaagatttagagaatgaaagatcaggctccacaagaagatatgctggagcaatagcgataccatcacttgcagcaattccttttaaagtcttggtcattattcagctaaaccttcttttttcatagtgtcggcaattgcgtccaatgcgtccttttcgtcatcaccttcagcagtgatagtaacatcagcattttgaccaacaccaagtgacataacacccatgattgacttcaagtttactgacttaccgttgtattccaagttaacatctgagccaaactttgaagcagcttgtactaaaagagtagctggacgtgcatgaatacctgtttctgcaatgatatgaaaatcgcgtttttccattataaatatctcctttaaattgaaaaattaaactggtaataaatacccattcgagtattagattatcatgtttttacagattagacaactgcaatgtaacagtttacattatttattcatcggtattcgtagcggtatacacaatcgcgccgcctctttctgccctaccggtaatatattgtctttttccataatttctaatagtcttttgaagatcaaacgcatcttttggctcaactttatactcttttatctcacctgagactaattgatctagaattttctgataatccaaaaatatcaccactcttttaaaattttataatttttccactattaattctactatttatattcccggatttaaaattgaagtgcaacactaagtgttaaacaaaaaggccatgaagacctaaacttgaagtgacgaaaaatcaagaaaggaagatcttcatgaccaattcaaattctagcatttctaagcactatcatcaattaaccagcgtacaacgtggacaaattcaagcaatgctggattccggcataacttcccgtactgttatcgctcaagaagttggctgccataagtcgacaatcagtcgcgaaatcaaacgcggaagcgtcctgcaaagagacagcagctatttattgtatgagcactattacgctgatactgcacagatttattatgagaagcgtcgcaaaaactgctatcagcgcaatccattgaagcattatgctgtctttttgagaatgctctccagacgctttaaagctaaatttgatgccaccagcatcgatgagttcgttggtgaattccaaaggactatgccaggctacccttgtcccagcacaccaaccgtctatcgctatattgatcagggcttgctggacataagcaatattgatctgcctatgaagctcaaaagacgcaggaacaagcgtcatcacagccatggcggtcacgctttgcacaagaagcatcttggcaattccattgaacagcgtcctaaggaggttgaagacagaaaagctccgctgcactgggaaggagatctggttaaaggcgtcagacgcaagaatcagcctgctttaatgactttgactgaaagaaccacacgctttgaagtagttatcaagattcctgactatcgggcaagcacatgccaaaggctgcttcaaaaggagattgacagacatcctgcctggtttaaatcaatcacgtttgacaatggctctgagtttgcggatatgaccaagatcaagggctgccagatttactttgctcacccatattctccatgggaaaggggcaccaatgagaactgcaatggtcttttgcgtcaattcttccctaagggcaagagcatgaaagacaagtcaaaagcttatgttcaacaggcaactgatgccattaaccacaaatatcgccgaatcctccaatatcacacagcagaggaactcttcaagcaatatatctcttcataacctaactgttgcacttaatttgacaattcaggtactatttatattcaattttcaaaaatattaatattttgtttgcggtaacaaaagcatttcttacaaaaaataagtgtttgagtcttagcacttgactaccaagagtgctaataatataattttggtacagttgaaaagaaaggcggtactatattttgctttgccaaaattgtcatgagcggcccgcttctattcaccttttcactaaggttaatggccaaagccgcgaaatagatttatgtcaacactgttatcaagaattaaaaaatcaacaaggaaatcaaggaaaaatgaataataatgaattttttggcgactttgatgatttattcaacgcattaaacggaaataacaacaatgccgcaaacaataataatgaaatgagaaataacgaccctagaatgcaaatggggggaggcgctggtaatggtggtcaaaacggcagaagcctacttgaccaatacggaacagacttaactgcccttgctaaaaaaggcaaaattgacccagtaatcggtcgtgataaagagattgctcgggttatcgaaattttaaatagaagaactaagaacaaccctgttttaatcggtgaagcaggtgttggtaagactgccgttgtcgaaggcttagctcaagaaatcgtagatggatcagtaccagcaaaattgcagaacaaacgaattatttcattaaatgttgtttcacttgttcaaggtaccggtattcgtggtcaatttgaacaaagaatggaacaattaattaaagaattacaacaaaacgacgatatcattctttttattgatgaaattcacgaaatcgttggtgccggtaatgctgaaggtggcatggatgccggtaacattattaagccagctttggctcgtggcgaattgcaattagttggtgctactaccatcaaagaataccgcgatattgaaaaagactctgctttagctagacgttttcaaccagttgaagttaaagaaccttcaattgacgaaacaattcgcatcttaaaaggtattcaaaaacgctacgaagactatcaccatgttcactacactgatgaagccattgaagctgccgcaaaactttcagcacgttatattcaagatagatttttaccagacaaggctattgaccttcttgatgaagcaggttctagaatgaacttaaccattccttatattgataaggataaaatgcaagaaagaattaatgccgcagagcaattgaaggaagaagccttaaaaaacgaagattacgaaaaagcagcctactaccgtgatcaaattgaaaaatatgaaaaggttaaagatcaaaaggtagatcctgacaagtcccctgttattactgataagatcatggacaagatcgtagaagaaaaaacagggattcctgttggtgatattcaaaagcaagaagaaaaccaactgcaaaatctagctgctgatttaaaggctcacgttatcggccaagacaaggctgttgaaaaagtagctcgtgccattcgtcgtaaccgaatcggtttcaacaagtcaggccgtccaattggttcattcctcttcgttggtccaactggtgtcggtaaaactgagttagctaagcaactggctaagcaaatgtttggctcagaagatgcaatgattcgtttcgatatgtctgaatacatggaacaatactcagtttccaaattaattggttctgctccaggttacgtaggctacgaagaagctggtcaattaactgaacaagttagacacaacccatatagtttgatcttgcttgatgaaattgaaaaagctcacccagatgttttgaacctcttcttgcaaattcttgacgatggtcgtttaactgactcacaaggtagaacagtttcattcaaggataccatcattattatgacttctaatgcaggacaaggcattaagaacgctagcgttggctttacagcagaaaacgaagatgaagctaatgaatctgctagaaataatatgagccaattctttaagccagaattcttgaaccgtcttgatgatgtaatcgaatttaatgaattgactaagccagacttgcttaagattgttgacttaatgttgcaaaataccaacaatatggttaaggatcaaggcctacacattgatgtaactgctgctgcaaaagataaattagttgaagatggctttaatcctgccttaggtgctcgtcctcttcgtcgtaccatccaagaagagattgaggataatgtggctgatttcaaacttgatcatgcacaggctaagaatttaaaagccgatgttgttgatggtaaaattgtaatcagtgatgaagcaaataatgaataggatttaataaaagacaaagtccaagttataccaaaagatttcgaagcaatattagaaatcttttttcttaaaaataaaaatatgctactcaatttgaggtatactaaattagaagaagtaaagctaacagaaacaggtgaattccatgcatttaattgatgtaaccaataattactctgatttggttcacagtcagctcaacactaccgatgcaaactatgttaaagtttattctcttggtaatacttcagttatttatactgaaagtaaggattctatcggtattgtacttgaaaaccatgaccgtcgtgttcgcgaagatgagattgaattcgtaatcaagcgtttaattaaagattatgattcttcatacactttgactgtagacaagagtcgtcatgtaatcgaaattcacgttgacaagtaatccaaatattgttgtatcaaaaaaggaggattgattcattcaattctcctttttctttttgctttaaagtttttctgttaattcaacatctggatatttgtcatggaagaaacgttccgcaaattcattttcaaataagaataatggattaccataacggtccttaactaataagttacgagtattagacatgcgtgggtcaagctgttccggatcaatccagcgcgcaacacgatgaccaatactgttcatttcaacttcagaattatattcattcttcattctgaattggaacacttcaaactgcaattgaccaacagcaccaagaatatactcatccgtttgataattgcggtaaagctgaattgcaccttcttggactagctggttcatacccttatggaatgatttttgcttcatcacgttcttagcagttactcgcataaataattcaggtgtaaattctggtaatggtggataaacaatcttgcgcttaccagcataaatactgtcaccaatttgaaaattaccagtatcgtataagccaactatatcgccagctaccgcatcagaaacttgtactcgctcgcttgacatgaattcagtcgcattatttaaacgaattggcttatcagttctagctaaagttacatccaagcctttcttgaattcaccagaaccgactctaacaaaggcgattcggtcacggtgatgaggattcatattagcctgaatcttgaagacaaagcctgaaaattctggatcttctggacttagctcctcatccccattaactgtgtgactctctggtgctggagccaaatcaacaaagctgttcaagaatgtctcaaccccaaaattggtcaaagctgagccaaagaagacaggagtttgatcacccatagcaatcttctcgcggtcaaacttgttcccagcttctttaatcaaatcaatttcatccagagtatcctggaattgaggatcttgactaagtggctcactatcaggcaacttaccatcttgatctaatggtaaaaagcgatcttgatcatttttgcggtaaagctcaacacgattattagcgatgtcatatagaccctttaaagtttgacctgaaccaattggccagtccattgctacaccctcgataccaagcaaatcttccaattccgcaattaaatctaatggtggacgtccatcacgatcaagcttgttcataaacgtgaaaattggaataccacgttgcttaacaaccttaaacaacttctttgtctgtggctcgatacctttagcagagtcaattaccatgacagctgagtcaacggccattaatgtacggtaagtatcttctgagaagtcctggtgtcctggcgtatccaaaatattgatacgtttgccttgatattcaaactgcataaccgaactagtaacagaaatcccacgcttcttttcgatttccatccagtcactagtagcaaaattgccagttttacgtgccttaaccgtacctgctttacgaattaccccaccaaacaaaagcatttgttcagtaatcgttgtcttacctgcatcggggtgagaaataattgcaaatgttcttctcttttttactttatctgctaactctttgtccattagtcctcgctatcttcttccttttttgattcatcaatcgttaataataccgtcaacaagcgtgaccccttcatccttctagtggtcaaagtcatcccatcaccaatatcaactgttaacttttcttccttagctggaatcacttttaaagtattgatcacatagcctgctatcgtatcaacatcttccatttgaagattagtaccaaattgctcattaaaatcatctaatggcatcttaccgtaaataatgtacttatttgtagctatttgattaaaaagaatctcagtgtgatcaacctcatcatcaatatcgcccacaatctcttcaaccaaatcttcaattgtagctaatccagttacaccgccatattcatctgtcaaaattgctaattgtcgttgcgtttgctgcatttccatcaacaaatcgcccagctcggcagtttctggtgcaaacagcggctcagtcatgacatctttatagtcaagattatcaaaacccttttgtttagcctttcgtaaaaccgttctgatatgaataatccctacaatcttatccttatcacgttgataaacgggaattctagaatatggctcacgaaggatttcatctagattgtcttgaaaactgacttctcgatcaaccatgaaagcatccgttctaggtaccattacttcacgggctgtcttaccctgaaagtccaaaataccttctagcattgaaaattctgtatcatcaattttatgactttcatgtaaagtaacaatttctttttctaaatgatctttagtccccacttttttatcgccggataatctattttttaagcgaccaaacagagttcccgctccaggatcactattcattttcgtactctctttcttaaaaaagttatctaaatatagctattatagcatagagccaataacaattatgttaaaatagcacataagactaggaggttcgtcatgaaaaaaagtcatgtcttactcgtttttacatttcttttgctaattccctatatctgtagcttagctattattggaatcggctataatgcattagttttacattcagctgaactttatcgcacattaatcggctcattagttggcgcaatcattatgtttgctgtcaaggctactattcaacggcctgttgatttattagctgttcaaaccaacgatggcttactgaagcagcttttacgtttcttcagtatcagacgacgctactggcttttagcagctaatattatcttagactttgttctttgctttgctgctacctacataatacgtgctcttttaacacttgatcaaatcgtaggcggctccatcggctttgttttgttaatcatgtttgtttcaacttgtcttggcgcttatgttgaatacgataacctgtcaatcgaccctgagcagcattaattacttgctggccttcaagtacattacttgggccagtttttttgtatccatgtcaagatcccaagtaatatatggcgtgtcactgtcacccaaattttcatgtacttcaattccgctagcaactacttttttggcaaaatttggcacggtactagtcaacggtaagttgaaaaagactaaagtttgattctcttctacttcctccgctacctctgcagctggtaattcaaacttcattaaacccgttggcacttcatcttttgctacatctgctaaaacgccataccaatacataaagctgtcctcacctgataccactaggacagaacgcttattttctaaattatgatcagctaaaaatttttgaaaagtttcatcattttccatttgctgattagcttccataaagctcttttgagcattcatcaaaccagctggaaatggacgaccaataaataatcttgattcaatatttttcttcattttttctcctaatattctactaattcgtctaaatcaattatttcaccgtttaaaaaggcatcaatctcacctgatgaaaaaccgtgactaaacaaataattttttattttaaaattgcgttcaatttctggaagatttctaaaacgcttgtaagccttaattccttgtttcttcaaagcttctgtttgtgcattctcatcttctttaagatccattgcatcaataataacgttactaatcccgctatcaaagccatgcgttaataatttagtacgcatcttacgctctaattcacgttgtgaaatcttgccaacttgatggctcatcgacttaatcacgcgttggcccacttcgagccaatcttcttcatcaatttcatctaacttatcctgactaatttcaggatcaacgcctttttgcgtcaactttcgtaataaaattttagggccatcagagccaacacgcaaatcatttttgataaacagcttggcatattgacgatcatcaagatagcctaattcattcaattgactaacagcactattggctgcttcatcagagatttcgtgtttttttaaatattgcagcacctcaaagatggtccgaggctcgtaactcaaaaaatgagccgctaaatcactagccttagcatcagcatcaaattgcctaatcttttcaacctgctcatcatttaattctttacctttaagcagcacaaattctgccaacgttttctctccggcagaaaaagcatattttccatcaataaaaacattatagcgacctggccgtttttgtgcacttactttggttatgatcaacttgtttcacctcgcatatttttctacatccatgctagcaaattttgctaaagcttgctaagaactttttccaggtagtacaattaattgaacacaatttagtttttagtagaaagaattaacgatgaacagaaaatttacccataataaaccaaaacatgaaaaagacgtcatcatcactattaaacgtttaggaattaatggtgaaggaattggttactacaagaaaaagattatcttcattcctggtgccttgccagacgaagtagtagttgccaagattgttaaatcatatccacactacatccaaggcgaactggttagaattaaagaaaaaagtccagatcgcgtagacttccctgaaggtgttgatcccgagattggtggcttagaattagtgcacttgtcttacgacaaacaacttgaattcaagaagaacaatatgcttgaatcattacgcaagtaccatcctcgtaattacaataagtataaagttaaaaatactatcgctgctcctgacccatggcattatcgcaacaaggctcaatatcaaattgaaaaagatcatggtcaacttaagcttggactttttgctccaaattcccaccgcttgattgacttaccaaagatgccaactcaaagtgaagatacacaaaaaacggaacgtaaaatcaaggttttaattgaaaaattgcatgttcctgttgccaactatcgtcgtcatttacctggcattaagaccgtagttgtccgtcaatcagaagcaactaaggaaatccaggtaaccttgatttcgatcggccacaagattaagaacttaatccctcttgctaaagaaattatgaaacttgatcatgtagtttctgtctatcagaatgaaaccgaatggcagaatccacaagtttggggaaataaaaccgaaaagcttttgggcaagaatcaaatcaccgaagaaatcttaggtaaaaaattcgccttatcaccacgtgccttcttccaattgaacccagttcaaaccatcaatctttactcagaagcattgaaatacttagacctaacccccgatcaaaccttgattgatgcctatagtggtgttggtaccttaggtattttggcagctgaccgcgttaagcaagttgttggaatcgaaaccattccagaggcagtcaaagacgcacaacataatgtcgagcttaaccacatcaaaaacgctgattatattcaaggcagtgttgaaaaggttttgccagaattacaaaatagtggtgttgcaatcaatgctttaatcgtagacccaccaagaatgggcttagctaaaagcttgatcaaaaccctcttgcgggttaaacctgaaacttttgtctacatctcatgtaatccctcaaccttagctcaagacttagttttacttagcgaggcatatgatgttcgggtcatccaaaatgtagacatgttaccacaaaccccacgctgtgaggcaattgctaagttagtgctcagaaaagatagataaatccaacaacctagtcttgggctaggttgtttttgtatataaaaaagcggctactggacaatcctgtcccttagtagccgcaatttcaagtggatgaggtagctcatcaattgatagtcacgatttttagttgtttggtatgtatttaaacaatggcattatcgcaaccaatattaacattcacttgttcgggtctttacataaaatgtaacttttaataaattggagtttttgcgaacagccaatgataattaatcaaataatttttaattaagctatttatggctgacacctctacgtatagagaatctttcaagtttccaataataatacaattctggagataaaaacttacttatatttttttatagttgttaacttttatttctacctcttccacactattcattatatctagttgtgaaaccgtttacaagaactaacccatatatttttgcaaaaatctttctacttgttgtcgatattgctttggatacattggataagacaaagcatgccctgcaagtggcgcaagccaaatttgcttttgagcagctgttgccgcataattttgccagaccatcttagttggcacaaagtgatccttgccgccatgaataaataaaaatggtcgcgtatttttatttaactgagcaaccgcagaagcatcttttaaataaaagccatttttcactctattaattccactaaccaaatcaactattggaaaccgtggaaaagccttcatatgaaataaattttgagcttgatagttaatttcacctttcacggttgaataaccacaatcttcaataaaagctttcacttgtggtggcaaaagcataccgcttaccatcattgccgttgcaccacccatgctttgacccataattacaattttggcatttgtaccagtttgatcaattacttgatagatccaacgcaaaatatcatctttttcagcccagccatagccgatatacttaccttcgctgcgcccttgggcacgtgcgtctggaacgagaacattataaccaaaatcataaaacattttggcaaaaccagccatactatctccatcactcataaagccatgtaataaaattgcggttttttggcatgtttatcaaggtactgggcgaacaaagttatgccgctatcagtttttaaagtccatgttttcttagaaaaatctctaaaccaaaccttatcacgataaagtggatccttgcctgataattctttggagtcagcttttttattaaacggtgtcatcgccatcttgaaaaagtactcgcttgccgcaaacaagccagctccagcaattaatgcggaagacaataatagtttctttttcatcttttaacacttccaaattcaattatttcacttttcattttataattaaattgctgaaaatttacaatccttatgacttaattatactgaaaaatgcgcttaacagacttgcttcaattaatcgatgacctgaacctgaatactaaattttatctaaagcatgatgacaaactacttaagtggggaaaactcactattgccgaaggaaaatgtctgctgctacccgggcaaacagcaatgaccaaacaaaaattgattaaattagttggccgcatgcgtggtcgcggcatccccttgttaatggtcattgaccaaaaagaatattccattttcggcctacagattcgcgaagatactggacaagcaattttaatgtaaaaagtgtctgagaaaaaagtcgatttttaactaaatttaggctttaactcaaaaaaaatcccattaaatcaaggtttgtatgtaccaagatttgatgggattttgaaatttctgtgttttttcccagacactttctattattaaactaaatcatacatttctggcattctgcaccattttgaattaaacattcgtctgcagtcaagttctcactaccagctaaaactttttctcttactctaacataataaattgagttgcatcgctttttaaaggcataaatataagccttatttaaatctcttgttgttgcattatcttcaacaaataaagttaacgaaattgattgatcaacatatttttgtgcagcagctgtaatatcaataatagcattaggtcctacttcatatgcgcccttttcgtaatactcataattgtctttattaatcttataagctggtacataaattcgacccaaatcagcctctttgcgtgtttcaacaggagctactactggctgcaaacttggtgtacatgaagataaataactaattgatccagtaggtgcaactgctaataagttagcattagctatacctgtctttttaattttagtaatcaattcttcccaatcttctttagttggaataactaatttatatttagctacaatttctttaatcttgtctgttttcggtgagacttcctcatcaataaattttttgaaataatcaccactagcatatgatgaatctttgaatcctttaaaagcaccatacttttcagctaatttatttgattctttaaatgcatggtatgcaattgtataaaagaaaattcctgtaaattcaactgcttctggtgaatcataataaatatgattagttgctaaaaagccatgtaaattcattgctcctagaccgattgctcgattagctttatttcccttttcaattgaaggagcacaatctaaatctgaagacctggcaacacgattaagcgcttgaacactatcagaaaccaaactacctaacttgtcagcgctattcattgctgctgcaatattaagtgatcctaaattacaacaaacatcgtagcccgtcttattaaaacttaagtcttcattataggtacttggcgtattaacctgagcaatttctgaacataaattagacatcacgatccgccccaatttcttttgtgggtttcttcgatttacagtatcttcatacataatataaggataccctgattcaaattgaacttcagcaatagtttggaagaattttctagcactgataaatgtctttttaatacgtggattattaaggagattttggtattctttagtaattgaaatatctgacattggtttaccatattcacgtttaatatcatatggtgaaaacaaagccatctttttattttctttggctagttcaaaagtaatatctggaatcactacgccaagtgataaagatttaattcttaccttttcgtcagcgttttctcgtttagtatctaaaaattgcataatctggggatgatgggcacttaaataaactgcaccggcaccttgtctttgccctaattgattggcataagaaaatgaatcttctagtaatttcattacaggaattatcccactagataaattcttcatttttttaataggtgcacctaattcacgcaaattagttaagcatagagcaacaccaccaccacgtttagataattgcagacttgtgcttattgctcgtgaaattgattccatattgtcttcaactctgagcaaataacatgaaatatattcaccgcgtctctttttacctgcattcaagaaagtcggagttgctggctggaaacgattactaataatatctttaactaaattcaaggccagttcttcattgccatcagctaaaaataaagcattcataacagcccgatcttcaaaacgttctaaaaattgtttattatcgtttgtttttaaggcatatgctttatagaatttagctgcacccataaagttcaaaaagctaaaattttgtgcataagctaatttgaaaatttctttaataaatttagctgtatataaatctagaacttttttatcatagtaatcattatcaactaaataagctaatttttcttctaaagaagcaaactttttcattcttggttcaatatgattttcaagatattgcttagtagcctccttgtcagctttaaaattataatttcctttttcatctttaaatttagcaagtgcatttaaagaaatatatgaatcattattaagattatcagtcattgtcttcacctgcatcagcaattattttattaacattatttacatcttcagttgttcccagtaactcaaatttatatagataaggaacatgtaatttcttagaaattacatcccctgccaaggcaaaagaattaccaaaattggtatttccactagcaataacaccaatacatttttgccgattagccaatttgttcaaaaagtggataacttgcttaggcacagcacctgtagtcccatggccaccagaataagttggcgtaattaaaatatattcttcagaaactgaaatttctttactgagtttaataggaatcctaatagaattacaatctaacttttctacaaaacgtgctgtattatttgaagtggaagaataatagacaactaatggctttttagaaatcccagtcatcatctgtagtctcctctcctgttcccattacatatgaagaaccattaccagaaaagaaatcatggttttcatcagcttgagctgataattgagcgaatacttctggagaaacataagtttcttctgcggtaaaaggagaatcatagcctaaattttgtaaaaatttacctgcattatacaagctgaaatgaattgcatcatcaaccaaatcaaaatcatcataaagctcgtgcaaatatttcttttccaaatcaattagtttatctaagaaatcaaaaacgaattttttcatttctgcttgtttagctggagctaattctaagtgtataattttttacggtaagttgaataaataattaaaaaagcccaagtcctttgaatttggacttgagctcaaacaaaaagaccagtagtctgatgttaagaacaaaaaacacattagaagctggtcttttatgaattcaattgtaactgaaatcgcaaatattataaagtctgaagataattatattaagcgtgaaagaaaaataatctgtttcttcttaaacctgattaaggaaatcatggccttggctttagctaaagttgatgatgaaatgattaccaaggttaaagcacagggctatcagattgataagaagaatgagcgctcaatcaatatggcttttggcgaagttaggtatgtctgcccaggcaaacaagcaaggtatcccttggatgaattaatgggctttgacaaatacaagcgctacagtattttagcagtcaaaaacatcttagaagtaagcagcgttgccacttatcgcaatactgctctagcagtcaattgcctgtctggctttaatattagccatatgcaggtgggcaatttggtaaaaatggccgggaaaaatattaaagcgggccaagaagcagattcaagatatgatgccgcaggcactaagaaaaaggtcccagttttgtatcttgaaggcgatggcgtggtgatcaaaggcactaaaagccggttggaatttcatcgctatcaggtctgtgaaggcattgtcaatataagcaagaaacgcagaaagcgaatcaatgccaaggaatttgtttctttaagccgacttgatgcgctgaacgaagccaaggagtacctggccaatacttatgatctttctgatactgtaattcttagcaacgccgatggcggtgctggatatgccaaaacagacttcgatgacattgtagggctatgcaagcgtcatgagcatttcttggatgtctttcacctaaataagaaaatcaaagaaaggctatattttgcgcctgacctgcaaggcaagctgatttctgctttggaatacaaatacagctatgacaaagttaaaactatcctaaccactgcagaaagccgactaattgatgaattgaataccgagctcaatcatgattatctggggcgcctaaggaattatattgatcgtcattgggacgatattaagccgtttaagaaacgaaaactgactgtgactaaagccattggctgctgcgagagcaaccaccgcaagtatacctaccgtgttaaggggcaaggcaagaaatggtcaaaatctggagcagaaggcatgcttaggatcttaagctgcatcaagaatcgagagctggaattttggcttagcagcgagtttgaagattcagaaataactgtattgactgaacaggaattaaaagcagcggcccgtgacagcttaaagaagcgtcatgaagttcatttaggcatccagcatggcgcattaaccgcacaggtagctggcaatagttatttaagcaagctaagcagaaatttaagtcatataaatatttaagaaattaaggttagactaatggtttaaaggctaccgcaaaaacattgacacttacgagctaatttctttacggccaattgatatttgtaaccactataataattatgaataaccttatctcttaagatcaatctaataatatcagcagtattaggcaatttacctcttgcagctaaataaaatggtaaataaaaaccaccataaagcaggaaccctggcataattgctgcggcaacctttgatttaagcggatcattgcctgtataatacggaattaccgctttagctcttgcttgtaaagcatcattattaactacccattcatgcgcttcttcaatttgttcactagtacataaagtagaaaaaatagttccatatgatcttgcatggacagcaaccataaaagcaaaatttgcatagatagcttgctctatatcagtttgcgaatttttaatttgggctacatcacccacacttgattgagttgtatctaataaagtcaatccagtgaaagtgcgagttataagctgttgccagtcatcagataattgattccaagaacttatatcattcgaaactgggattttttcaggtaaccaaaagttttgagtaactctgttccaaacctcaagatccttttcatctttaatgtcattccagttaatagctcgcatatttttgccgttgttattgtaagcaaattcaactggtgactgtgaatgatcataataacccatattttttgctcctatcattatttattgttttatctaatatatgtgtgagtacactatagcatagtctgctcaatgacacaacgaaactgtcaaatcttttgtgtaaatagatctttctcgtaaattgattttttaattatttatttaatcaaagtaggattctaaggtgtcctgaacctgaccaaagcctttatgaattcgattgaaataacggtcattgtagctcattgcctgaatgccaataaaagcatcaagcgactgttcagttggaaactctgccttaggcttagctttgcgcttgatcacattgttaaatgattcaatcatgttagtcgaataaattgaagctctgatctgcttgggatagttataaaagaccagcagatctggttctatgtctttcaagcttctgataacatggctgtaaaccttgccccatttggtatagaagtcatgcaggacagctgtggcttcttctttgtttgtctgttgatgcacctgtttgaattcgttcatgatcttttcacgatcgtcgacgcgtactttagcgcagatattgcgcatgacatgaaccaaacagcgttgaaaatgagctttaggataagtcctggccaaggctgttttcatgccaacaacaccatcagaaagaaaaagctcaacttgctttaagcctcgggatttcatgttttgaagcatatctgtccagacttcaatgttctcactaggagcaatgcagtaatcaatgacttccttatgtccattaggtttaatgccaatggcaatatatactgcttcacgctcaaacgtttctcggcgcaaaggaaggtatgtcgcatccaaatagacacagaaaaacttgtcgcttagcttgcgtttgtggtaagcctcaacctttggaatcatctgcttggaaatatttgatacctgagctggactgtaatggctgccatacatcttttcaattagatcggctatttccctggtggtcacgcccttggagtaaagcttgataatcatgctttccaagatatccgagtgctgcttgtagccaggcagcgtgtgctgatgaaattgaccgttgcgatcccgaggcacttgcacttcaattgggccaaattgcgtatcaactttgcggaaataagcaccatttctagagttgccagtattccagccatttctggcatagggatcatagcccagaaaggcagtcaattcagcttctaacaagttattaacagcctgttgtagctctttgcgcaataaatcatttattttgtctggattgaatagagcttgagcaaaatctttggtaaaatcattcatgaaggagttcttctttctgtatgtgtttttttgttcaaaccaatcatacgagaaaggaactcctttttctaatgtttaaagaaataaatttaaggaatcattcatccttacacaaactattttacagtcttgacacaacatgtggattttttggttatttataatcaatatattgtggttaagtcgtttttgataatacaaaattattttcaaatttattttatcttcaaaaaataatgtaggtgttgttttttgcttttttgacaaaaaaatcgtgtctgggaaaaaactaattctcagacaggaaaaaagaacgatgatttcctaatggatttcatcgttctttttctatactttaagtgccttccttgatattattgaatcaccacaaaacaaaaagaaagaaggcaatcttaatgtatcaaaattataccataggtcaaacagctttaacactcaacttagacttcgctattcctcataatcatttggctaataccattagctggtttgtcgattcaattccagaagatgtcttattgggtaatactgctaaaaccggtcgtccagcttatcatccagcgatgatgcttaaaatcttgctttttgcttattccagaagagtattttcaggcagaaaaatcgaattaatgctggaagaaaacgtgccgatgatggctttggctgaacaccaacagatttcttaccatactatcaataactttagatccagcaagcacgccaatgagctggttaagaaaagcttcctctactttaccaatttgttagaagccgagggccttatcaatgaaggagcgatctttattgatggcactaaaatcgaagctgacgccaatcgctatacttttgtttggcgcaaggcagttgaaaaatttcatgacaagctcaaaggtcaagcggttgagctttatgatgaattgattgccaaagaagtcgtcaaagcaatggcaaaagagaaagtccagaccagtcaaggtttggcagagctagcacaagaaacggaagccgagattgaaaagctgaccgaagaaattgagcaagaacccaaagcaatccctggcggttcgcctagaaaagcaagaagacgcggtcttaaaaagctgcttcataaactaagaaaagactatgttcctcgaatgaagaaatatgaagaggcgaaagaaatctttgcagggcgtaacagctattctaagacagatcatgacgcgactttcatgcatatgaaggaagatcacatgaagaacggccagctcaagccaggctacaatattcaagctgccaccactgatcaatatgtggttgactttgctttataccctaatccaactgatttcagaactttcgaaccatttttaaagcagatgacgacactagacaagtttgacaagattgtcgctgatgctggttatggcagcgaatataattattcaatgttagaagaagagtattcagacaagaagtactatattccttataccatgtacgaaaaggaaaagaccagaaagtatcgcaacgatccaactaagctggctaactggttctatgatgaaaaagatgattattaccttgatcaaaatggcgtcagattcaacttcaaatattatagtcaacgtaaagatcgatcgactggtcaggttcgtgattttaaggtctatgaagcagatgaatttcaactaacgccagaattagaacgcttagccaagactaagagcggacgccaacgtcaggttcgctataatcctaactggcaatacctaaaagaaaaagccaaagcagttctccaaagtcctgaaggcagacacatctacagcatgaggaaatatgatgtggagccgatttttggacatttgaagaacgtctttggcatgcgccgaactcatttaagaggcaaaaagaaggttgaaacagatataggaatagccttcatgatggtgaatttaagcaaatattggaacagaagatggtcaaaagaccaattttctttgttcaaaaataaaaatagacagaaaaagacggtcaagcaactcaaattaagagttggattgatcgtctttcagtatctaagggttagtttttttccagacactttcttattcttttacgcggtattgacgaatatgatccttagtaccagcaaaataccaagtacctacttcatcgtcgctagttaattctaaaccaccctcaggatctaacaaagccgtattgaagacgtcttcatattgcttaactgtcagcttcttccgccgattaagcattgcttgatcagctgtaggatcaatttgtttttcatatccttcaaccaacttgccactataaaactcagccattgcacctgaaccatatgaaaacaggccaattaatgagccagcgggtaattcaccattctctagcaaactaagtaaactcatataaagtgaagcggtgtagatattacctactcggcttgataattgtttagcagccgcaaaactacgctccaacttgatcattgttgcttgatcttgcccctcaatagcaatattgttagccttcatccccatcttagtaaatggcaaatggtaagtaatcgcatcaaagtcgcttgttttcaatcctttttgcttcttataatcagtaaaggtcttcttgaagaaatccaagtaaacttgagtcgaatacttgccgtcaactaaagcggtgcgagaataatttggtctccagaagtcgttaatatcttcgctgtaagctgaatgaccattatttagggctaaaatgcttgggtcagctttgatgagcattgccacgctaccggctccttgtgttacctcaccagcagtattaacaccatagcgagcaatatcactaccgatgacaattgcggtttgttcaggatgtacccgaacaaaatcacgtgccatcattaaggctgccgttaaaccaaagcaagcttcctttacttcaaaagttcttacttctggcttcaactttaaggctgtttttacaaataaagaagctgactttgattgatcaatactactttcagtcccaaaaattaatagaccaactttgttcttatcaatcttgtcaataaactttaaagtcgcattaattcccattgaaactgcatcttgcgtaatatccgcaacactcatctctctttgaccaatgccaactaaaaacttatttggatcttgctttcttgcgttcgccaaatcgaccatatcaacgtacttgtctggcgtaaaaagtccaatttgatcaatacctacttgcattatttttcctttcttatttttgctaaaagctccttagcatgactttcagaataatttttttcactaatcatcgcagctagtagctgcttgcgctcatgttcgtcatcggttaattcagtgactacgtttctagcctgcaatttcatatgccctgcttgaatgccgacagtagaaattgccagtaaagcggctaaattgtttgctagagcaacactaacaatgatctcggctaatgttttactcgtgattttttgccccaaaatagcaaagctttgccggacatcatgccgagctttaattgaaccgccaactactccaatcgccattggcaaagtcaattcgccaactaaataactaccctgcatcgtccactttgataaactgcgatattggccatcatgattggctaaaactgcagtggctgcttcaattgcccgataatcattgcctgtcgcaatcaatacggcgtcggcaccattcataattcctttattattggtaactgcgcgataaggatcgtcaattccaatttttcctaatagagcaacacgttgtgcaacttgcatcccaccaatcgtttgtggatcaatcttcactttagccgtggccaattggctaggataatttgataaaatcgcaaataatttttcatcaacaccagcataattttctaatttagccgctaaaaattccaaaatcgagttggttttatttgcgcccattgcttcggctggatctaccagtactttcaaataaagtaaattttccttttgaacagctgtgatttttttaacgccaccgccatgacgcactaggctagtaaatttttgattaaccaactcaaccaacttaggaaattctttttctaattcaattaatgaaaaagaattgttgaccttcaaaacgatttgaccataaatcccttgtcggtcgctgctagctgtcacaccaccatttctagcaaagatactagctccatgattggcggcagcaactactgaaggttcttcaacagccattggcacccagtatttttgtccattgactattaagttttgtactacacctaaaggcaaacgcagctgccctacaacattttcactcaattcatctagacgtctcaaaaccgtatcatcgatttgccctaatgcaataccttcgtcctgtaataacttacgtctagcttcaggctctaattgataaaatttcattctgcattctcgatttcataagcaatcgcctgaccgccaccgatacacaaagtaaccagggcacgtctgccttttctcttctttaatccactaattgcactagcaactaagcgtgtacccgttgcacctaaaggatgacctaacgcgattgcgccacccataatattcaatttatcagttggaatttgtaagtcgcgagctaccgctacactttgggctgcaaaggcttcatttaattcgataatatcatagtcatcaaaattacgccccgtcttcttaagcagttttttaactgcataatatggagtataacccatcagtgcaggatcaaagccagcttccgcaaattcacctaacttggcaatttgcgttaagcctaactctttcattttctccttagttgccagaactaacatacttgcaccatcagtcaaaggagacgagtttccggcagtcacttcaccatccgccttaaaaacaggctttaagttactcaatgcctcaagcgttgtatccggacgaattggttcatcatgatctaaactttgaccatcaatctccacatccaggatctcattatcaaaaaatccggatttaactgctgcagctgcctttttatgcgactgcaatgcaaattcatccatatcctgacgactaacatgatatttttctgctacgttttcggcagtaattcccatatgcttgccagaaaaagcatccatcaaaccatcgttaagcatagtacttactaggtgatctgctggatcatttttgttttcttttttaacaaaataaggcgcattagtcatgctctcactaccgccgacagctactagatccaaatcgcctagttccatctgtccttgagctagacgtaaagctttcagacttgagccgcagacttcattaattgtaacggctgcagaagcttcactcatccctgaatgtaaggcaacttggcgagccatattctcacctaagccggtatccaaaacattccccataaacagtgcttgaacatcagctggcttaatattgcccgccttcattgttcctttcaaggccattacacccaaatcaattgcagaagcatccttaaaaaatcctcggtacttgccaaaaggtgttcttttagctgcaacaatataaatgtccttcatatattttctctccattctccataatgtgtattttttaacaaatatgataatagcaaaaaaatattaagaaaaacataaaaagactacgccgcagcgtagtctccctaataattaagcttattttttattttgcttaccttcggcttcaaacttcttgctcaattgcatgatatatgcccgcaattgttccttaatttctgggtgcttcaaaccatattcaattgaagtttcaaggtagccttctttgttaccaacatcatgacgttcgcctttaaaggcatgagcaaagacacgttgagtcttgttcattgtatcaatcgcatcagtcaattgaatttcaccgccacgacctggtttttggttagccaaaatatcaaaaatttcaggtgttaataagtaacgaccaataatggcataatcactaggtgctttatcaatatcaggcttttcaacgaatgacttaacattgatcagtcctggcatgatctcattttccggttcgatgacaccatacttagaaacttcttcatgtggcacaggcataactgcaattgtagaagcatgcgtcttgttatagcgatcgatcaattgcttggtcaatggcaccttatcttccattaagtcgtcgcccaacataactacaaatggttcatccccaacaaaactgcgagcacggaagatggcgtctcctaaacctgctggatgcggttgacgagtgtaatacaagttaacgcctaaatcagtaattccttcggttaggcgaagcaattcttttttacccttttcttccaaatcttgttctagttctggattagaatcaaagtgatcttcaattgggcgtttgttcttgccaattacaattaaaatatcttcgattcctgactttttagcctcttcaacgataaactgaattgttggtttatcaacgataggtaacatttccttaggtaaagccttagttgcaggtaaaaatctagtacccaaaccagctgatgggataacggcttttcttactttcataaaagcacactttctatttcaattttataagttcatcataacaaaatatgcatttttcagctacttagtttttcgtcttttcttttgaatataactggcaatacgaccagcagaatattcaacttgtccaacacggtttcgcacaatagcagcgttaacaccaacgccaaataaaaataatactgctgcaatattcaaccagagcataaagatgataaacgtaccaacaatgccataattctcccaagtaatcgggaaatggtgtaaatagaaactaaaaagaaatgatagggctaaccagcctacaacagttacaaaaactcctggccaaattactctctttttgagttttatattaggcaaaacatagttcaaataccataatgctagcatcataaccaatattaatactggatagcgataactaaagatcttgctaatttcattaagtggtagctgaaaaatcggtcctaaaaagttgagtacttgttgcccaaaaaccaaggtcaatgtagcaattgtaaatactagaatcatcaatcctgtaaaaataaaagtaatagttctagtccaaagaaaattaagcattgataattttaattcaacttgatgaaccccataaagtctattttctccaagacgaattgcattaaccatatttgataatgaccaaactgcaaacacaataccaaaagaaatatagcctgttgatgtcgttttcaataaagaatttataattggcataatgaattttgacacttggtctggaaaaaccaagttcaaatattcagcaataggcgcagtatcaatgtgaaacaacggtaacacgttaccaatgataataataatcggaaaaatagaaaacaaaatgtagtaggcaataataattgaactagcaaatatctctccttgagataaggtggttcgtaatgtagaaataaattgcccaatttttaaaccaaaatggtttttaccatttttcatccattatcctaatcatccatctcatcaaagtgagggatgtacttttctaagccatcgtaaggatgctgcagggtcaagatcttaggaccatcttttgtaattgcaaaggtgtgttcaaattgagcagcattagaaccatctggagttgcgtagtaaacccaatcatcgttaggatcatcaacagtacgttggtcgatgtgccagtcgccaccagcttctaccataggttcacaagtaatagtcatgccttcacgcaagcgaagaccatgacctgccttgccccagtgaggaacttctggatcttcatgaattgatggttgaataccgtggccaattaattcacgtacatcaccgtaatgattttcatcttcaacataatgttggatagcagcaccgatatcaccaattctgttacctaaaacagcttggtcaattccgagatacattgcttttttggttacttcaattaatttcttatcagcttcggaaatttcgccaactggataagtagtacatgaatctgattcataaccgttcaaattgcaagttacatcaaccttaacgatatcgccttcctttaagatgcgatcttttcttggagtttggtgggcaatttcatcgttaaccgaaatacaagtaccatacttataaccttcaaaaccttgttctgaaaggcggccgccacgacttgatacgaagtcttgacaaaactcttcaatttcccaggtagaaatgcctggcttaatcacatcacgtaagccttcaaacatagttgcaagaagatgtcctgaagcttgcatgcctttaagttcacgaattgatttaattgtaatcaaaataatttctcctttataaatttttatttagtttcagatatttctattataccgttttccaaaatacttttaaaaggtcgggtttttgtagaatcaaaacaaaactctagaaatacctgaaatattttcccggatttaaaattgaagtgcaacactaagtgttaaacaaaaaggccatgaagacctaaacttgaagtgacgaaaaatcaagaaaggaagatcttcatgaccaattcaaattctagcatttctaagcactatcatcaattaaccagcgtacaacgtggacaaattcaagcaatgctggattccggcataacttcccgtactgttatcgctcaagaagttggctgccataagtcgacaatcagtcgcgaaatcaaacgcggaagcgtcctgcaaagagacagcagctatttattgtatgagcactattacgctgatactgcacagatttattatgagaagcgtcgcaaaaactgctatcagcgcaatccattgaagcattatgctgtctttttgagaatgctctccagacgctttaaagctaaatttgatgccaccagcatcgatgagttcgttggtgaattccaaaggactatgccaggctacccttgtcccagcacaccaaccgtctatcgctatattgatcagggcttgctggacataagcaatattgatctgcctatgaagctcaaaagacgcaggaacaagcgtcatcacagccatggcggtcacgctttgcacaagaagcatcttggcaattccattgaacagcgtcctaaggaggttgaagacagaaaagctccgctgcactgggaaggagatctggttaaaggcgtcagacgcaagaatcagcctgctttaatgactttgactgaaagaaccacacgctttgaagtagttatcaagattcctgactatcgggcaagcacatgccaaaggctgcttcaaaaggagattgacagacatcctgcctggtttaaatcaatcacgtttgacaatggctctgagtttgcggatatgaccaagatcaagggctgccagatttactttgctcacccatattctccatgggaaaggggcaccaatgagaactgcaatggtcttttgcgtcaattcttccctaagggcaagagcatgaaagacaagtcaaaagcttatgttcaacaggcaactgatgccattaaccacaaatatcgccgaatcctccaatatcacacagcagaggaactcttcaagcaatatatctcttcataacctaactgttgcacttaatttgacaattcaggcctgaaatatttttaaagtttgctaaaactaaacgtttttgcaatagtttcatgtataataaggtgtcgtataatgcagtgaaaggtatgaaaaatcatgaaagcaagaattgtttatgccagcatgactggtaacgatgaagacatggctgatattttagaagaagatcttcaagattatggctttgacgttgaaacaagtgatgtcggcttcactgatgccaatgactacttagatagtgatctttgcatttttatcacctacacctatggtgaaggcgtaatgactgatgaattggcagacttttatggggagttaaaagacttagatctaacaggcaaacattttgctgtgatgggttctggcgataagacctacggtgaacacttttgtgaaaatgtttttgactatgaaaaagcattcaaggattgcggcgcaactgaaattactaaacccgtaacaattgaaaatgcgccagatgatgatgcagtcgctgcaatcgatcaagctgcaaaggaaatggccgataagttaaatggctaataacaaaaaagacgtcacagctgttgatcaggcacaaatacgccgtctaggtcaaaaattaatcaagcgacaccgtaatctttgggtttacatggttttcggctttgtcgctgcattaatcaataccttagtcttcatggtcttacactcatggtggcataatgtgatggtaatttctaacaccatcgccttcatcgtctccaacctggcatctttctggtttaaccaaaaggctgtttttatcaataatgtcgatcatgaacacagcacgtggcataaactaatcgtctttttcacttatcgcgtcatcagtttaatccctgatacattaattatgttagtcggcttatcctggctgcatttaaacgcattactagtcaaaattatcgaccaaattttagtcggtgtattcaattacttaactactagatcagtctttcaaaagcaagaacatactatgattgaacgtgcaaaaatgcgcattcaagaacaaaaaaataaaagagacagcaaaaattaaaaccaatgtcattaagttaagacattgacaaattgaatctaatctctgtagaaccgaatcattatgatttggttctttttttgcataaaataaaggcgaaaagaacctaccttttcgccctctgattaaattattaaaccttcaaaattattgccagaaagctggtgttaattatgaaagcccttcacagaaatattttagatcgtcttgatcaaattatcaatgatactggaaagcatattcatgattttatcgatgatcctcatgccttcactaggaagcggtttttagatgcagctacagtcattaaaactactattaatatgcaaggaaaagatttgaccagtgagttgtttagagcttttggccaaaaagctattaaaaataacgataaagtagtcagtacttccgcttatgtccaacgcaaaggtcagctttcacccgcatgttttaagcatattctaactgtatttaatcagaatttatttaatatccagttatttgatcataaatatcgtatatttgccattgatgggtctgattttaatcaaatctggaatcctaaatcagagaatatcgttggaaatctcaatcataaaggaaagccatattgccaaattcatgttaatgcactctatgacctgttaaataatacttatcaagactgcatctttcagcctaagtcaaagatggatgaacgtaaagccgccgttcaaatgcttaaaaagctaaattgcggaccatatatagttactatggatcgaggttataccggctttaacatgattgaaaattgtaatcgcctgcctaactgttattatgtcatacgtactaaaacgggatatggcgcatttaaggaagtagctgagttgcctaatcaagagtgtgataaggatatagcttgctgggtgactacctctaattattattatgaaacccataaggctacagaaaacgttcatttggttaaccatcattaccgtcaatatataaaatatcggtctaaaaataccaaagatggcagctgggactttggagagttatgtacaataaaatttcgtgcctgtaaatttagaattaatgatcctaaatcaggcaaagaagaatgggaagttgttctaactaatctaaatagagccgattatcccttaaaaaggatcaaagagatctaccatttgcgctggggcattgaaacttcattcaaaaagttgaaatatgctttaggtagcgtacagtttcattccaagcaggatagatttattgaaatggagatctatgcccacatgattatgtttaacgcagtcagtcaaattgatgctcaagcatatgtaccacaaaaaaactgcaagtatcaatatgcgatcaatttcaaacagtcatgttttgtcatccaggctatgtatataatttcttcttcaactgaaatctttaaaaagattcttattcaaattagtcattacacaattccgatcagaccaggacgaaaagacaaaagaaatctcaaacccaaatcagctgtatattatttatatcgtgtagcctaatttctaaacaagatttgggtttatttggcatgaaaaaagatcattcaaatgcgataaatcgcaaatgaatgatcttaaaagtccaagtcgataatttgtcaatgtcttaacttaatgacattgaaattaaaactgtctctttatttttttactcaaaatcttttggtttactttcactatcttgattaaagtaataataaatatcatccataattcgatcagctgcatgtccatctccatatggatttttggcattcgccatccgatcatattcgtttttgttttctaacaaagctagcatttcttcacgcaccttgtcgacttcagttccaactaacttcaaggtaccggcctttacgccttcaggacgttccgtcgtatcacgtaaaaccaaaactggtttacctaaactaggagcttcttcttgtacgccacctgaatcagtcatgataaagtatgaacgtttagctaagttatggaaatctatcacatcaagcggctcaatcaaatgaatccttggatcaccaccaagcacttcattagccactttttgtactcgtggagataagtgaaccggataaataatttctacatcaggatgcgaatcaattacttgccgcattactttaaatactcggcgcattggctcaccttgattttctcgacggtgcatagtaaccaaaatcaccttattaccaggagtaattgcgtctattacctcatgatgataatcttgttgtacagtctgtgctaaagcatcgattgccgtatttccagtaacgaaaataaaatcagaatggtgattttccttcagtaaattagccttactcaattcggtcggtgcaaaatataaatcggctaaatcatccgtcatctgccgattcatttcttcaggatatggtgaatacttattccaagttctcagacctgcctccacatgtcccaatgtagtttgctgataaaaagtagctaaagaagccgcaaaactagtcgtcgtatcgccgtgaaccaagacaatatctggtttctcttctttgatcaccttagataaatcaatcatcactttagaagtaatttcttctagagtttgattttggtgcataatattaaagtcataatctggtttaattttaaaaatatctagcacttggtccaacatttcgcggtgttgtgcgctaacgaccgttacttcttcaaaacgatcatctttttttagtttcaaaacaagtggtgccatcttgattgcctctggacgcgttccaaaaacagtcattaccttaattttcctcattaaaaaattcctccgcttaactattttactatacctgattttagactatcttgcacccgctttctgtgttttaatggaagtattaaattgaaagttggtcgatgcatgaattcatcattactattattaattacaactggtttaattattttgattggaactttttgccttgtttttggtatggacaaaaacagacccgctaaaactagaaaatatttactttatactgcactaatctgtgttttcctagtttggggcttaattactgcaattatgcttcaacccttaggataataaagataccttttggataaccaaagcatgtaaaaagcctgcaagaccaatacttgcaggcttatttctatgaccccggtgagatccgaactcacctctacggtttaggagaccattgttctatccagatgaactacggggtcaaacctaagattaactttaccaaaaaaagtggtaatagttaacctttttttagaattgtggattaaaaaatgttttcggatggttggtatcagcaatcttatcagctgctttaacaaaaggcatccaaattagcaaagcaacaatcatatttaaaatgcttaaaacaattgcacgccaatcataattgcaagccagaaatgggccaataactggtggcatgatgctaggtactgccacttgaactggattaaccaatcccataatgctaacccaataagaaaaggcaacattaactagtggcgctaatacaaatggaattagatacactggatttagcactacaggcaggcccaagagaattggttcgccaatgttaaaaattcctggagctagtgagattttggcaattgtgcgataatcactgcgtttagaaaacattaaaatcgccacaattagcattaaggttccaccagcaccgccaaaccaggcaaagacatcaaatgagccacgtacccatacatacggtggaatatttccattactaatcgctgtgatgttatcattttgagcagtcatccaaattgaatccaaaattggtgatagaacccctataccattaattccaaaaaaccaaaataactgcactaataaagtaatgacaattaccgtaccaaagccttgtccccactttactaatggagtttgaattgtggtaagcaaccaatttccaaaatatttaccggtaagaatttggaacaaataattaattccgcctacaccaaatattgcaatcattgcaggtaataaagaatcaaaagcagcttgttcagcatggggcaagttcgatgtcacatgcaaaataatccttgctttatagcaagcataataaataaaaaagcctaatgagccaaacaaaatagcagtaaagaggccagtagttgagaactgactaatgtcaaatgcattatgaagtgtaacattatcaccatgaaatttaatcttagctatattggcaatgcttagtgcaaaagaagataatgccacaattgaagcagcaagtctatttccttcaaaagcttttgctagttgatagcctaaagccaatgctaagaaaaaggcaaataatgaaaatgttcctcgccaaactaaattactgattgctaccaatggctgcatcgcaaaagcaaaggcataccagcctaaatgatcatgagctgcttcaattaagctcttaattaaaactgctaatgatcctgccattgtaattggcattaatgagacaaatgcatcccgtaaagcaactagccatcttatctgaccccatctactagctagcggcaaaacatagtcctctagccatctaactaaacgaatcatttctttcctttcaagtaatgtggatgatatcccttgttcttattacgtttcttgcgttttttagttttatttttcttagtcgaagtcttaatgggctgctctttagcctgcttcttttccttcttgagtttaggcttttcagttgttaaatgatagcctgcaaagtagacacgctctatttgtaattgatctgccaataatttcttcaaatcacgaaaatcgtgatcatcgcctaaagtaaccacataaccttcagcgttcattcgacctgttcttcctgcccggtgcatgtaagtattagtctcgctcggaatatcaaaattaatcacataggtaaggcctggaatgtccaacccacgcgcagccaaatccgttgccagcagcaatttcgtcttaccagtagctaggtcatttaaggctttttcacggcgttctttaccaaattcattagctaataattcgaacttagtcttagtatgcccaaaaataccagcaaagcgcatcatcgttttatttgaatcaaagaacaaaattcccttaaagtgatccaacttagtcattcgctgcaaaaattcaatcttgtgttgattgtctacttgcaaaaaataatgtttagtcgctgaagcttgttcatttctgacatctactaacaagaaatgacggttaaaaacttgctccgcatcccgtgtaatctcagaatctgttgctccaaataataagatttgactgtctggacccagattttgccctaatgctgataacaattccattttagtaaattctaaaatatcatcggcttcatcaataatcaaagtcttgatctggtttactttaattcgaccacttgagaagaagtcaaaaaaacggcctggtgtagctacgaccacttcaggatgctttttcttcagattgtcttcttgtctctttctattgccagcaccaaccaagctgacgccttttaatcctaaagcgtggatgtaaggattaattgcatgacgaatttgtacagctaattcagtcgttggcgcaataattaccacgctgttagcattacctggctgtgctttttccaaactaggaagtgcataagccaatgtcttacccgtacctgtcttagccaatccaaccaggctcgcaccattgcgaatggcatcatagctttctttttgaattaaagttggctggtccttgtgttctctaattaaaacttgtttgattttttcttgatacattattactgtgttaattgcccatacttttgcttatattgaccaacggtcccgttatacgcgtacatcgttacctggctttctaagcctgaaacattccttacgcgtccgttagtagtgtagcaccaaaatgaatactttaatttattcggtgccttactatctgatgacataaataacgtttgcggattaaagtaatgttgatatttatgatcaactttcaccatgactcttttgccagctgcttgcaataaagccgcaaactgccccattgaccgcaaatatctcgctgaacgagtagtcactgccggtacaattagaattggcagcgagcccgtattttgtcctacttgcttaaaaaagtagcggtaatgctgcatcggagtcgattcattgctataggaaatctcactaccaaatgccaagttcgttcctaaaatttggtcacgataagacagatagttttcatcaaaatatgatctgccttgggttgctttcaaatatataaaggaaacgccattagattgcaatttatgtaaatcaacatagtcaatatcttgatttaactcaatcccaatcgcacttgaattagcatctggcggtaaagttgtttgccgcttaaaattgaaaaagccaatcaaaagaaatgcaatcgccagaattaataaagtcaaaatcgctggcaaagtatacctatgctgaaatcttttcatcggctaaattcctcccttaattattttaaccgaaaagcctatcaatacaaacatttccagtcgatgtgctaaaatttaaataatgtaaacgaaaggcaacaaataaatatgaaacgacaaatctcattcggccaagcattggctaccgtagtcggttctgtcatcggagctggcgtatttttcaagatcggaacaattactgcacaaactggcagcacttcaatgaccctgtttgtatggattttagctgggatcatttcaattgcatcaggtttgaccatttcagaaattgccgccagcttaaaaattaatggtgccattaagtatcttgattacacttacggccgcgtgtggggttttctttttggctgggcacaaatgattgtttattttccagctcaaattggtgccctaagctcaatttttggcattcagtttgtctccttatttggaattaaggcgaggtattctaacctaatagctatcttgctagtgctttttctcttaggaattaatctaatcggaactaaattttctagcaaaatgcagtcggtcatcactatcctaaaaatcattccaattgctttaattattatttggggattatttaatcctgccaaaatacctgcaccaattattccgttaacagtcggcactggacattcatttccaaccgccattagtcaagggttactttctgcgttattcgccttcgaaggctggattgtagtgactaatttggctaacgaagtcaaaaatccagaaaaagacctttcacgggcaattattttaggtctttcagcaattacattgatttatgttttaatcaattatactttcatgaccgttttacctattgatcaattaactaataacaataatgccgcgtttcaagcttcaatgaaattgtttggtcagtttggtggaaaactagtcactgtgggaattttaatttctgtttacggtgcggttaacgcattcatgctgacagggatgcgtacgccttatatcttggctcaagacaatttattgccattctccaataaaattggcaaggctaatatccataccggtgttccagtagttggcgcgtttattgttgatgctattgcaattgtcatgattctactaggtaattttactgttttaactgacatgctagtcttcgttatgtggactttcaacacaatgttgtcagttgccgtaataattttgagaaagcgtgagccagaattaaaacgtccatttaaggttccatggtatccgatcattccaattatttccgtgatcggtggtatcttcatcgttgtctcaacaattatcaatcaatttgttctttcaattattggtattggtttaacattgttaggactgccaacttactattacatgcaaaagaaaaataattaacgaaaaaagccgccgattttgggcgactttttatttgagtaaatatatttattaatgttgtgaagcaccgctagttgcatcattttcttgatgatcttcataggcagtattggcagcaattcgaccaaaagtgaaaatatctgccaaggagttaccacccaaacgattaccagcatgaatgccaccagcattctcaccagcagaatatagaccatcaataatttgaccatctttattcaaaacatgtgccttagtatcaattactaagccgcccatagtgtggtgaatagcaggctttctcggagtagcatagaatggtgcaacttcacatttgaggcctaatacattcttatggaagtctggatcctcgccacgatcaacgtaagaattataatcctggatagttttaaccaaaactgctggattcattccaatttgttttgccaaatcttcaagcgtatcagctctaaacaaggttccagccttaacttgcgcatcaagtgactcttgggttgtattgtaagcagtgtccttaatcttatcgtccgcaatttgataaatcaaaccaccattttcgataactgccttagccaaaacatcccgttccgcaaattcattaacaaacctcttaccctttttgttaaccataatatagttagcaggcggagttacaacaccagtgaaaagctcaccggtctttggatcagctactggcattaattggataaagcccataccgaataagtctgcaccagcttcaagacctaagttaatcccatcgccagtaattgcaggtgaattagttgttgtactatcgtctgcaatgtttggccaataggtattgtatttttgaaccatcttagtattggcaccaaagccacctgccgttaaaattactgccttagcatgcacagtcaaagtactactgtcagcgcgtgttgcaattacaccgcgtactttgccatcttcaataattagtttttcaacacgagtttcaagatatggatcgacaccatgctctcttatccaatcacccaaaacgtgaataaaggcataacctaatggctctactggcttatgacctctgcgccacaaaccaccaacaggttctgtaacttgagaattatcaaacttaacacccaaatcttggagccatttaacagaatttaaagcattagttaccaattcatgtaccaaagcatatttaccatgaatttcgttaccttttaaatcagtccttttaccacctaaataagtttgaatttcatggagtaaagtcgaatcaaataaataatctgtaccagaatcaatatattctttgatttgtctttgtaatctttcaaaatcaaagcggtattctaaatcaatttgttcaattggcgtattagccaagtcttctaaagtctgtttttcaccaggaagagccttaaatttactttgccattctggttcagccgcattcattggaccaccagcacggctagtattaccaccgatctgtggatacttttcgagaacagccaccctttcaccatgttgaattgagcgaactgcagctgctagaccagcgccacctgcaccaactacagctacatcaacagtaatttcttcatcttctacctttgtagcagcgggcttttcacggtttttccattcggttgaatcgccgcctgcttcatcaattgcttcggctacgccatcaatcacaccatgactggaaatagtcgcgccactgaccgcatcaacgtttaaagtttgattttccacaattgttttaggcaaacgtctaaatacttcatcggctactcccttagtttcacctgatgaatctactttgattgaagtaactttatcgccatcaatgtcaacttccattggcattgattcggaaccatgacctttagcttttacttgatattttcctgacttcattgcttacacctctaataagtttaattttatccacaagttaatattagtgcgtcatctgttgatgtatcaaatatcaatttcactatactttcataataaaattgttatgagataactatgtttcgttctccaaataaaaaaagcttaatgcaaatagttatccacattaaactttttaattgcatgatttaattaataaactgaaacttgaaagctaagattaacgctccttccccgcgcctcttggctttttcttatcaaaaataaaaacgcaggatctctctgcgttatactttaagtgtcaacctgaaaagtaaaggagatcctacgcaatgaacagtatagaacaaatcgacacagaaaacgataccaaatccttaatttcttcatttattaatctaattggtctagctaagttgactaaacaagtcaactttaagcgtaaatctaccgtttcattaaccatgattatctcttggctgatgtctgtacattttgctcggctttccttattcagagctaagagtgacaagcgtttttccgttagaactgctcgcaatgtacttaacgatggaagaatcaactggcaaaaactattatgcttgattgcagctcggctcattggctgcttcaaacatccgtaaaaagaaacattatctttattcaagcatagttgaggctcaatatcatggacatatctttttattaaagctcgtttttgtctccaaccgtggaaacaagaacaagtatttagttttagctactactcagacaaagcttagacctaaagaaatcatccaactttatggtcgtagatggcaaattgaaacatattttaagacgtataagcaatatcttgctttagataaatctcaagttcaaagctatgatggacaatgtggctatatcgcagttacagcaataacttatgatctattggcctggcaggaaagacaaaatacagatgataagacaatcggagatttattctatctaatgaacgaatccttacctgatattagattcgtagatgcattggtctacttaatttcagaattaaaagagcttaaacagaatagttttgaaaagatagatgaagtaatcaatgactttattaaccaactgccacgattcatacaaattgcactgaaacagatcatataaaaactaattacgtctagaaaagctcaatagtgacaggacttgagcttgattttggtgctttcaagtttcagtatttaaattaagcttcagaggcgcctgatacagcatctgcttcttgttcatttgaaacagtaaaataattataattggtattatccgcagcagtcgtacctgcaacaaaaccagaagcatagctccaagaattcatcatacttggcattgaatcatgaccattagcaccaccaacaatttctcctgcagcatagaagttacttacgggattcatatcattgtcaagaagctgcatttgatcagtagtttcatatccacccaaagttgtgcagaacagaagtttttgttcaattacataatatgtatcgccttcgaactcatgcataaacttcttgtctctaccaaactcaggatcataatctgctttaacatcttcagtatagttatccacagtttccttcagcgtttgataatcaatacctgctttttctgccacggtcttcaagtcgcctttgaccagaactggactcttctcgccaaccaaatcaaagaatgattgaacctcttccttggtaaagccatacttaagcattaattcatagaaacggtcccaggttctttgatccatgacaatgtaagctaccttacccttttgttcagcaatcgcatccctaaaatgcgtataaggtgcagattcgttaactattctcttaccatcagtattaacaaaaatagcccccatatcggtcgcttctttagttgaataagttgttagcttagcaataccaggttcaacttccaatccatgtggatataccttataccagtctaagttacgagtaaccaaattcatatttttggcaaaatcaagataatcaccagttgaagtcattggaccataatatggaatatcagtcttatgagcctgataatcacgtgcaccccaaccaccagcagctaaaacaagtgacttgaaattgacattaattgtctggtgcttgccttcagcggttaaagataccagtttgccagccttatctttattcaacttttcaacacgggcatctaagataatttgtccgccctttttttcaaatgcctcagccaccttagtcactagttcatatgagctttcactaggcatttcaatttgacgatatacactatgttcaactgtttgggtttccgctttttgataagtcaaatttgcaaattcagtaataaagtctactgccttcccaatattgttagctaatagctttgacaacattggataattagtaccgcggcattcacgagtaatatcttgaactagtctatttggcgaatccttctttgccgtttcaccaaataattctgcagaaactttagagccagttcctacaacatttgagccatttaaaatagttgctccacctaaatagccatttttttcaagtacaactacttttttacccatcgaaagagcacgacttgccgccattaacccggccataccggagccaattacagccacatcaacatttagttgcctttcttcatgtacgacttctggcttttttccgtcaagagcaatgttattttcggctaatgcttttttaccagaatctagcattgcttgagtcatcaatgatgccccagaaacagcgtccacgtcaaaactttgattatcaataatatttttctttaatttaccaaaagtttgattaaaaattgcaggagtttccgaattcttggttactttgacatcactaattttattgttttctaagtcaatctcaaaatcaatttgaccattgcgaccatctgcttgagctttaatagtttgtttggtcataaaaactactcctttacttgttctttttactaaaccgcttatattataaccacaatattaaatctaaaaaataaatttaatttgatattttaatagaatttttttatcaaaagcagtaaataaaagcgagtgatcattctcactcgcttgattctttatctaattttcatccttatttattagcgtaatgttgaataacttctggcttcaataccccaacataaggaaggttacgatacatatttaaaaagtccaaaccataacccactacgaattcattgccaacctttgaaccataatattctaattcaacatcggtagttcttctggcttccttatttagcattgcacaacacttaacgctcttagcgccacgtgccataatgtgttctttcatgaatttcaaagttaaacccgtatcaacgatatcttcgacaattaaaacatcgcgatccttcacgtcagttaccaaatctgatactatcttgaccttaccagttgactcaaagccatcaccataactagaaacatcgagaaaatccagttgatgtgctacgtccatttgtcgagttaagtcagtcaagaagtaaattgcacccttcaaagccccaacaactaccggctttttaccagcatagtcctcagttaattgcttacctaaacggacgcacatctcatgaatgtcatcttctgtgaataatttgtgatctataatttggtcaatattgtcgccttttgccatttaatctacccttcaattcaatttacatatattattcctaataaaaagaattataacatctttaaacaaaaaaagcgtcattttcaacgcttcctctgaataatttctaattttcatcctttgattgatcgtctttttgatctttatccttaatcggttcaacgataaaccagcgcataaagccttgttcgatactgtctaaggtaaacttatatccttcaagttcaattgattcaccctttttcaagttaggataatgttccatcatgtaaccaccaatggtaataatatcgctatcttgaaaggccttcagatctgtatggaagaaacgctcaaagtcatataaagtcgtcttacctgaaacatgaacttgaccatccttgtccttgataatgtaatcatctgaaacatcatcaatttcatccttaacagaaccgaaaagctcttcataaatatccttatcagtaacgatcccactagtaccaccatattcgtcaactactaagacaattggtgtgtgcttagaaatcatcaagtgcaagatatcttgaattggcattgattcaggtaccgtgataatagttctaataattcttgttactggtacgttgccatcaatttggctttgttgcacaatgtcgtacgcataaacataacccacaacgtcatctttatcattatcacgcacaactggaaaacgactgtagccttcttccaagtattttttcaaggcataggcaattgtatcagttgaatcaagtactgacaatcttgttctgtcagtcatgatgtccttagcaaccttatcgtttaattcgaaagctctttccatataagttaagtcttctttatcaagcgaaccaccatgaaccgcattacgcgacaacttgatgatttcagattgtgaataaacttcattttcttcatcagctggagtaaagcccatcaattttaagattccattggagctagtatttaatagccaaacgaatggataaacaatcgtatggaaaatatgaagtggcgtaacgatccccatcatcatcggtactggcttgtcaatcgcaatattcttaggcacaacttcagttaagacaacttccaaataagttaataaaactacgcctaagattgcactaactgacttgatgagtgaatcattcattggcgtcaaatggaaaagatcttccaatatggttgcgaatgtatcagccgagaaccaacccaagactacaccaaccaaagtggtaccaacctgagtagttgacaaatactcattcaagttgtgcgtcatatgcaaagcacgacgcaactttttcttatttccttgacccttagcaagcatatcttcgagctgacttggtctagtttgaactaacgcaaattccgcagcaacaaagaatgatgcaacgataaatattaataatgttgcaactaaattagttactatttgagctggactcaaagtattatcacctttttttacaaatatattactaaaacctattttaccatttcttgcctaaaatagtgcagttttacacaagggataacggttttttgtaatttattcgaccaccttgtaaatttcattaaacggtacacgctttggaataaatttaggatcattaatttcagcattcttgtcgatatagccaactgcaattgccattccgacagcttcatcatctggaatttgggcatattctctaaccaattctgggtatgaaaccattgagtgagctggcatcacacctaagccacggttaatggctaaaagcatgatactttgtgcaaaaattcctaagtcaaaaacggaccaagctggagatttcttcggaaccgttaaaaagataattgctggtgcattgaacattgttttattcgcatcattaaataattgaagcttatttctgaaaaagaaactttgggatgcacccatcgtagccatattacgacttggataagtatcccaatctagtgatagcattgaagcaaaatcttcatgtgcaacttctttatcatcaatctttttagctgaagcagccttaaacttgcttaaagcatcccccatcaaaacatatgcacgccatggctgagaattaagcaatgaaggtgattgctgtgccattttaacgattccagcaattgttttttcttgtaattttctattagtaaacttccgcgttacatgttccttttcataaacatccttaaaattcatttttcctcaattcctttttgcttatataataacaatctatattttattatagtaaaaaactgttaaaaagcttaattattgctcttttcttgctttttcttttctgctgcctgtttttttaaataagcactcattgcaagatcattttttcgcatagcaataaacgcagtaatggttaaagttaatccgccaagacaaatcacaagtaagccaatcggaaacaagaagtctgctcccttaggaataaatgatgccttaattacccagcatgctataccaattaacatcaaaactatacccacaatgactgccttagtgttcggtcgatatcttttcataaatgcccttctttcttaattaacattctaacagaaaaagcttagcttcaacgtagaagctaagccgaaaactagagaaatagtcgttaaatttttacatgagagaggggaaagttgactatttaagttcgatagtttgtactttttgggaatgttcaacactgcctttttcaatcggagtaactgacttaatcaggtccatgttggtgtagacaacgatgcagctgtcatcgtatcccttgtctgtaatcatttggaaatccattgtggctaagggttgacctttcttaactttatcgccttgactaacattcactgtaaacggagcaccttttagttcaacagtatcaagacccaagtgaatcaaaaactcaataccttggtcattcgtgataccaatagcatgtttagttgggaagagtgtggaaatactaccatcaactggtgcatagatatgattatccttaggcttgatagcatagccatcacctaacatcttagttgagaagacatcgtcttttacatcagtaattggcataatgtcgccgtcaactaccgcatctacttcaatacccttattctttttcttaaagaaattaaacataattaataacctctggatttctaaaattcaagtaataatatcaacataaagcttgcgagtaataaaccagctgcagtaagtgaaattgcgattattactcgactaacgccatcttgtgtcttcttcaaagctcttgctcgataaaaacctaagatagctaatactacgcaaagcaagttgccaacaaagagctgagcaatcatctgacttcccatcaagaagcgataagtctgtcgattgattaaaaactgcttgtggtttaacaacatatagtagcctagtatgaagtcaacgatagcaacgattgtactaatcgcaatcatcggctgcttcataatcatcatccgaatcgattgaccagaagcaccgcttcgtagtgcaatcatcgcccaaaacaatagtggagcaatgaaaagtacgtatgaataccaagtcaaaatcttcttagtatccaagtgcatgctttcggttattcgatcgataaagttgccaacttttcgtttactaattgcccacattgatctctacatcctctccttgactctgttgccaagctacatattcactaattaccaaatcaattaagaagtacgctggggtaaaggcaaccttcccgctcttaaagtcggcatcatcagtaaaggcaatcgttggaaaataaatgttgtgctgcactaatgaagctaatttattttgcttcaggttagtgaacgaaacatatttgaatttatcattcactagttccaacttagtgatttcctcattgatcgttttattatcacccgtaaacgagataataaacaaaacatcgcctttttgagcaaagcgtcccgcagcttttaactcctctaatgctgatggcaaaacagttgcatgcttgccaactacaaacaattcatgagccaaatattgtgcgattaactcttgttgccaaccagtagagtaaatgtaaattgtccctgcattatctaaatcgcgatacaagctattgaaatcacgttgtttgaaatacttcaacacgtctgaatttactttactaagttcccgcgcaaaattattttcaattttgattggtttttgcttcgattcggctaattcgaccaaatcaaatttaagctcactgtagccacttagtcctagctttttacataaccggaaaattgcggattcggatacataaagctttttagctaatttggctaagcttaatttgctacagtctctcggattatttagaacatattgaactatctgtttttcagaatcattcaacttatgactattgtcatagaccattgatctcaaatttgccataatacctgtgcccttatcaatatataatttatatattaatacgcgtggtgctagttaaatcgttctagacaatatgccatattataagctaaaatagctatttctagccgttgttgaaaacctactaagctcctggctcgattattctcagcattgtaatagctaagaaaagaaaagtcgctttcgattgttcttctaattgccattaactgatgatcattatgctttttagcacccctcatgtttttacgatatggtgtccaaagcacgtatcccatacgctttagcttggctgctaagtcttttcctaaatagccttcatctcctaaaagataatggttggctggatgagcattgatcatcaattctactgtctctttggcatcatgtactgacgctttagtaactgcatagtcaagcagatagccatcatcgcttactattgcgtggaccttgaagccataataatagactttcttggttgctttataaccaatatcagctacgccccgaaagatcttgacacgataattgcgaacaggctggcaaactggcactgggaaactatcaataatcaaaaattctccagctgtctttacttcttgattccaagcctgacggatacaacgaattagaggcaagagcattcgagctcgacggttaaaacgagaatgagataagccaacgaagaatttacagaatcttcgttgagattcaattccaatttcagtttgccaaatgagcatcgctaagatagaactatcaggaagcttggtctgatcaacatttttacgatgtttaagtccatcaggcgcataaagcttatacagcgagcgacaaatcacatttaaccgattaaaactaacttgtaaatggtgagaaaaacgattaagcttgagatagttcaattagatcagactcttttctatttaaattacttacaacttgagtctagtctaattggacttttttattaactaaaacgatttaactagcaccacgcgtatattaatgataacacaagcgctttcagattatagcaattgtttcatttgatcaacaacttgatcggcatccaatccgacaacgatgtcaacctcgttgttatctttatgttgtacttcgtaagaatctgcgatcttcttgaattctgaatctggagcgaccttcttaggatcaacgacatgagttcttactctagttgagcaagcaatgacatcttgaatgttggagtcaccaccaagcaagtcaacgataccagtagctctttcaatataaggattatcttgttcagttgataccttagcgtcgccaccttgttgttgcattaaagtgttcatttcatcaagaacttgaggtacgtccaaacctacgataacttggatagccttaccgtggtgtacgacattgacagccttgtttgctttaaatgcggcatctgaagcaactttatttggatcggcaacagatacacgtaatctagtagcacatgaactcaattctgtaatgtttgaaggaccacctaataattcaaggtaagcagttgctctttcaatgtaagggtcattagcgtccttaccagcagcttctgcagccttcttagccttgtattctttctttgaaagaaggtgaacatcttgatcatcggcttcacgacctggagtaatgtaattgaacttctcgatcatgatcttgaagacaaagtaagtaataataccgaagataataccaacgataaattccatcacataggtcttccagtggttttgccaaagtggaatccagttcattgaagcgataccgatcgcaccatctgacatgaatcctcttaaacccaaggcccacataactgtgttcatcgtggctgacaatactgagtaaactacccaaagaactggagcagcaaacaaataagtaaagtcgataggttcagtaataccagctaatactgaggttaaagcagctgggataagcaaagctgaagtttgcttcttcttgttcttcttagcagttgcgtagaaggcaagacagataaatggtactaagaataccttttcgttaccgtaaagttggaatccttcaactgaagcgatttgtgaaagtggtttagtacttgcagcgtattcagcaaggtgtttcaaccagtatggttgcaaaccgccggcaacaacggctggaccgaattggaatggaatgtataccaagtggtgaagaccagtaggaatcaatacacggttcaagaattggtaaatccaaacaccgataaatccactatctacgatgaagtgttgcatgctggtgatacccatttgaacttttggccagccccagcaggtaatgagtgctaaaggaatcattacgaagaatgctaaagcgtagacataagttgaaccttggaaagtaccaagccagtctggcaacttcttatcaaagtacttattgtgtaaccacactacaataagagcaacaaccaaggcacctaagatactagtgtcaagagtcttgataccagcaatgttagttaaaccatggttagtagcgttagcaacaatttggatcttgtcaaagttaggaataccaaaagctgcaccccagtgggtaagcattgcaccgatgaagtagttgtaagtcaagtaagcaataactgcttccatggctgctctacctctagccttgttggctaaaccgattggcaaacctacagtaaacaaaataccttcttggttgaacactgtccaaccaccagctgaaattgtgtcccaaactgagttccatgtagttcccgggttggcaattaaaccaaacagagtcgggttattgaacaaactacctaaagctacgacaatacccgcaaacgagaacagcataactgggacgaacatagcggccccaaaccgctgtattttctgcatcataatcgtttacctctgaagaaaaaaattaaatcaataacttattcttacatctacacctgcatctacatctttatttcatcagatcaagtcaaccgcaaggtgctcatacaattgacttttgccatttgtgcttcacacaaatatttactcctcaaaaatgttttaagataaaacgtccagttgatatcaaattctgaacttaactctatcttagtagctagcttacatttttatttataccatagttttaagctaatgcaagcgttttttaaaactatgacttattgtttcataaagttaagatgatatttcatttcatgaaacgaaacaagtgataaaacctttttcctttccaagatgaactactttgcttactgaaataacacaaagtctggcataattaacggtaagttaaatgcacaggaggaattattatgacaatcaaatttattgcacttgataccgacggtaccttgcttaattcaacaggtaagattttgcccagtacaaaaaaggcagttaaaacagctttagaccaaggaataaaagttgctttatgttctggtcggccaatcgcaggattaaaacattttatggacgaattaggaattattggacctaatcaatatgctatcactcttaatggcgcaattacccgcacagcagatggcaagataatgactaaagatctagtttctaatcgactttatcgtaaaatgtatgcttttgctaacgagcatcatttaccttttaacgttgtttcccctgattcaaaaataattacaggagatcatgatgttgatttaatggtttatactcaagcttacgaaaatagtgcgactttatacattagagagctagatgaattgcctagtgattttgaaattgctaaaggttgttttgccactaaagctaagttgttagaccaatgggaggataaaattcgccaagaatttgggcaagagctgtatattgttcgtgccgacgattgcttcttagagctacttcaccctaatgttaataaaggaaccggattaaaagaattaactgaaaaacttggcattactccagaagaggtcatggcaattggagacgaaagaaatgatattaccatgtttgactttgctggaacagctgtttgcatgggtaatggctccgaagaagcgaaaaagcatgctgattatgttaccacttcaaatgacgaagatggcatcagcaatgcttttgagaaatttttatgaacaacctaaaacaagtatctgagaagtgattaatctttcctagatacttgttttattatttgttcaaatattcacgcaaagctggcaaaactttctccgcctcaactcgtccgacctcatacactcgtcgcatctcttttttatctgtttctaaagtgccaatttcaagcggaaacggtgaacgaataataaaagcttggtcagcagcttcatcttttaccatctgatcaagcaccgcattataatcctcagctctagtagccaatttttttactactgcggggtatttccttaaaattactttttccagtggatagagcttactctgctttttgcgataagacttcggctgtgtagcaatgactacctttttatcacagttttgctgctctaaaaaatcatacggaattgaatcagatacaccgccatcaaagtaataatgcccatgaattgcaactggatgagcaaaaaatggaatcgacgacgaggctctaatccactctaagtcaacataacctgcatcatgtaattgatgataaaccggctcacctgttgcagcatcagttgcaacacaccaaaagtccattggattagtcataaatttttctttacctgaattgtcaaattaagtgcaacagttaggttatgaagagatatattgcttgaagagttcctctgctgtgtgatattggaggattcggcgatatttgtggttaatggcatcagttgcctgttgaacataagcttttgacttgtctttcatgctcttgcccttagggaagaattgacgcaaaagaccattgcagttctcattggtgcccctttcccatggagaatatgggtgagcaaagtaaatctggcagcccttgatcttggtcatatccgcaaactcagagccattgtcaaacgtgattgatttaaaccaggcaggatgtctgtcaatctccttttgaagcagcctttggcatgtgcttgcccgatagtcaggaatcttgataactacttcaaagcgtgtggttctttcagtcaaagtcattaaagcaggctgattcttgcgtctgacgcctttaaccagatctccttcccagtgcagcggagcttttctgtcttcaacctccttaggacgctgttcaatggaattgccaagatgcttcttgtgcaaagcgtgaccgccatggctgtgatgacgcttgttcctgcgtcttttgagcttcataggcagatcaatattgcttatgtccagcaagccctgatcaatatagcgatagacggttggtgtgctgggacaagggtagcctggcatagtcctttggaattcaccaacgaactcatcgatgctggtggcatcaaatttagctttaaagcgtctggagagcattctcaaaaagacagcataatgcttcaatggattgcgctgatagcagtttttgcgacgcttctcataataaatctgtgcagtatcagcgtaatagtgctcatacaataaatagctgctgtctctttgcaggacgcttccgcgtttgatttcgcgactgattgtcgacttatggcagccaacttcttgagcgataacagtacgggaagttatgccggaatccagcattgcttgaatttgtccacgttgtacgctggttaattgatgatagtgcttagaaatgctagaatttgaattggtcatgaagatcttcctttcttgatttttcgtcacttcaagtttaggtcttcatggcctttttgtttaacacttagtgttgcacttcaattttaaatccgggaaatttttctttatcaaaaacatccaacttatcaggcaaaatatggtaacaaaagttagccgcatacaaattgcctgaccgccgccatgatttccaactagcataatatggtttccccgcaaagcgcatgttgtagcgcaatactcttcccttttgctccgacttcaagtttacgccaaaggcagcaccggctgaaacgccaattgctaaatcaaaggttatgtcattttctaaaaacacatcaattatgccagctgtaaacagcccacgcattgctccaccttcaagtactaacccacttttcatattttccctctttatcaaaaaaagacctacgcttttcgcataggtctaatttattcttattttaattttacttcaagcccgaccattgccattcagttacttctggcatatccttaccattgtcacgaatgtattgatggtgcttttcaagcaagtcatccatatgactaatgaagtccgcattcttgccctttagcttatcgatgctttcaaccgcatccttagccaaatcgaagcggtcaaggtggttcaagacacgcatatcaaatggagtagtgatatcaccattttcttcatagcagtgaatatgaacattgtagcgcttgcgagcaaaccagatggattccatcatgctcttgtagccatgccatgcaaagattactggcacatccttagggaataatctgtcaaattcttcagttgaaagaccattcttgttgtcctttggatccattaacttcataacatcaactacgttaatgtagcgaatcttcaaatctgggaacttcttgtgcaagatatcgattgcggctaaagtttcaatagttggttcagtttcagttgaagcaaagacaacgtctggcttaacgcccttgtcagttgaagcccaatcaatgtagcctaagcccttgtctaccaacttcttggcttcttcaattgagaaccattgtgtacgaggctgcttagaagttaccaagacattgatgcattctctgtcttgcagtgccttgtcgcccactgccaaaagcgtattagtgtctgatggcaagtattcatgaacaagatctggacggttcttttcatacaagtgagtcaagatacctggatcttggtgagtgtaaccattgtggtcttgttggaatacagttgaagttgcgacaaagttaagtgatggataatcatgacgccagtattgttccttagcctttcttaaccacttcatgtgttgggtaagcattgagtctactacacgaccaaaggcttcataagtagcgaagaacccatgacggccagtcaaaacgtagccttcaaggaagccctcatcttggtgctctgacaattgtgagtcaattactcgaccgcttggagccaagttttcatcatttggttcatgaacttctggctcccattgacgtttttgattatcaagcaattggaacaaacggtttgatttagattcatctgggccaaaaccgcggaaagtagttgggttgagcttagcaacttcatccaagtacttagcccattcaaccatgtcttgggcttcaactgaacctggcttgtcaaacttcaaagcaaatttgcggtagtctggcaagttcaaacgcttagcatcaaggcaaccattagtgattgggttcatggccattctatggtcacccttagcagtgttttcagtcacgatttccttaggtgaaccatcttcgttaaataattcttccggcttgtagctttccagccaatcagtaagcatatcagcgtgttccatatcgccttgagcaactggaattggaatttggtgggcacggaagctgttttcaattgggttgccatccaagtccttctttggaccagtccagcccttagggcattggaagataatcattggccaatgtggcaaggtagcgtcattgttttcacgggcatgcttttgaatagccttgatttcttcaatgacttcatccatggtcttagccatttcttcgtgaacctgcattgggtccttttcaccgtcaaaacgaccacccttaaagactgaaacaaagtgaggatcccagcccatgccacggaagtattcggttaattcttgatcgctcatgcgagaaacaatggttgggttagaaatcttaaagccgttgatttgcaagattggcagaactgcaccatctttaattgggttaatgaacttgtcactaaaccatgaagcagctaagggaccagtttcagcttcaccatcaccaatttcaacagcggcaataacatctggattatccaaaacagcaccagtaccgtgtgacagtgagtagcctaattccccaccttcatgaattgaacctggagtttcaggagcagcgtgagaagcaacaccgcctgggaaactgaagcgtttgaatagcttagccatccccttttggtcctgggtaatctctgggtaacgttcagtatatgaaccatcaagatatgagttagaaaccattacctgaccaccgtgacctgaaccctcaatatagaacatgttcaagtcatacttcttaagcacacgattcaagtgagcataaataaagttctgtggtgcaatagtgccccagtgaccaattggcttaggcttaacgtcttctgcaaccaatggggtcttaagaagagggttcttcatcaagaacaactgaccaactgacaagtagttggctgcgcgccaataagcatcaacgctctttaaatagtcttttgagtcataatcaactgccatcttattctcctttgagcatctaagagtgctctttttcatttgttcttttgtttacacttatatcataccaaattatctaaaaagttcaactatttttataattgtatcctaccaattaaaaaataagtatttaatttaaaattgcatcccttttttgttgctatatcaaccttttaatgctttgatataagtatttagttgcttaaatactgataagtacagataaacaaatatcaaatactgacataatcagtgcaaaattattcattcatgttagattactaaatggagggcatgagatgacccaagaagaaagattaatacaaattaaacagttacttaaaaaaaagcaccaattatcaactagacagattgcagctcacttcaatgtatcatttgatacggcaagacgagatgtaattcatctaactgaaactggtcaagcaattagagttcatggtggtttgatggaaattaattgcaacagcgtacctgattttttagcaagaaatcaagtacaatcaccggttaagatgaaaatggctagaatggcaaagagatttgttcatccaggtcaatgtgatttcatcggttcatcaactacgttaaagcagctctgtccaatgcttaatggtattgacatgcagatcgtcacgaattcaatcgacaacgcattaagcttattagcaatagaaatcccatcagtcagattgttgggcggcgttatcaacaaaaagcagcgtttcatttattctgaaacagcattagaaacattgcgtcaaatccatttcaatactgcatttattggtggatctcgaatcagagatgacggcgtatatacaccaagcatggctgattccaaaattgtcgaaaccgccgctagtcgcgctaatcaagttgtattagttgccgaaaaatataaatttactaatcaatcctcttcgccatacatgtctgtccccctcaatcagatcgatgtccttattaccgacaccccattgcctgaggaattaaagcatcattttaatccaaaaacgcaaattatacctgttttaaaggagtgatagttatgttcagtctctttaaccaaaagaaacaaagcgaaagtcgtgaagtataccaagatttgaagaatttttataatagtttttttagcaatatctacaatgaaatgaatattggtcgctatcggcagattcgcgatgcaattgggcttgttcttaataagttcgacagtggtgatcatcctcttgaatacactagcaaattggtcatgtatattcaggctcgaattgccatgaatcacctgcatctaactcatgaacagcaagacctaatgaaaaagctaagtgacgctaccaaatatgtaaatctttcttatgtttatctgagtccgctcacttcggtagaacaatttgttaatatttaagtgtatctagaacctgctctagatgaaaaaatgaatccaaaaagaccgagtagctgatctgctcggcctttttatgcaataatattgttaaaagatatagattttttcaaaggaaataattatgacaaaattaccattcaaagttgttgctgtcgatatggatggcactttcatgcatgatgatcaaactttcgatcacaagcgctttgaccgcatcttaacagaattacacaaaaaggggattcactttatcgtttcaagtgggcgcccttataccagattacgcaaagattttgctggctttttaaaccgaatcgacatgattgctgacaatggctcgcttttgcttcaagataatcaaattattagcactcatttgctcacttataaaacaaccttagatctaataagttttatcaaagagcattattccaagagttcaattattgtcactgggatcaacaattcatatacaactattaatgcttctcctagttttaagcagacgatgaacttctattaccccgatcgaattgaagttactgatttagcagcggctatcaatccgcaggatatgattactaaaatcaccttaagttatcaatatgatttttccgcggaattagaaaaagaattcaaccaaacccatgccgagaagattcactgtacttctagtggtttcggtttgcttgatattgtgccttacagcgttaataaagggagcgctctaaaatacttcttacgctattttggtgctaaacccaatgaattaattgcctttggcgacggaatgaatgatgctgagatgttaaaactagccggttacagttatgcgatggctaatgcagaagatcaagttaagaaaatcgccaagtatgaggccccgagtaacaatgatgatggggttttagaggtgcttgattcatatttagctaaagtagagaaataataattactgtaaactaaaaccgtctgaatgagcaaaataaaaaagtagccaagttttcttaaactaattgacttaagaaaacacagctactttttatttacccaaattaacaaaggtattaaagttcatataatgataatgcacgcgcatatttgatacttcaaacggcgtcccatcatccaagaagaagatcccttccattacaccaacaggttcagtcggcttcaaatttagcttctgctgatcttcttcattcgatggttcaacagtgatattcaagaatgacttagtaacggtctttccctgttcatcttccaaatagttaaacaaagacttttgtaaagtctctggctttaattccggcacaattttaatcggcaaatatccagtctcaattaaaaatggttgttcatctaacagtcgcagacgcttgaattcataaacaaaatcattttcatttaaaaataagtcttccgcaatttctttagttgccttaatcacatgaaaatcaagcaacttaatttgttgttttttaccagggactttaaaagaatcagtgattccaagattcgatccatcataacgaaacattgcctgtttgcgcaaatatagtggattaataaaagttccactacctcgctttttaaaaacgatcccttgttgagccaacagctccagcgcacgcttcattgatgatcgacttacctgatagtgttcggctagactgcgttcatcaggcagtcgcatccccttatactgattattcaaaatattctgtttaatgtcatgcataactgtccgataaacataatctgccattattctcgtccttgatctgcctttttaatactatcaataaaccaagttgcaaacttatccaagtccacatctgtcgcaatctccgcattggcatgttcttggtccataaaatccattacgctggcaccataagtatattgcccgcgcaattcaatattcacatttgcctttttcattgtaaacatttccggatgaagcataattccaactgcagtcggatcataaatcttaattcgcggatcaccgtctggttcatgaatgttagagaaaagtgaatacaacatattacccacttcaccacatgtcttaactttatccatttgctctggtgttaaatgggccttatttccaatttcaagtggagcaaccttaactagcaatccactatgaaaaactacctgcgctgcttccggatctcccgcaatattatattccgcaaatgggctatgatttccgtgaccaatattaccacccataattacaatttccgcaatattttctttaacttcaggatattgcttaaaaagtaaggcaaagtcagttaatggtccaatgcccatcagagttattttttctggactacttttaatttccttagccatcaacgttgcagcaagaccaggttcaattaaagaatcatcagcttgttcaaattcaaagccggcaatccctgttttaccatgaaccgaagcagcactaatcattggtgccaccagtggttgattagcacccactacgacaggaaccttagtatgcaaaaacttttctaaatttaaggtattttgcaaggtatatttcagtgccacgttaccccaagtaggcacaatcatgcgcacatcaagttcttgtgcaaaaagactaatcgtcatggcagcaatgtcatcaatgccaggatcagtactgataattaaaggtttcttgttcataaaattatcctctcgtattaagtacttttataatagcaaaaaaccaaccaattaagaaagtggttggttttattctaataattatttttcttttttgggtttaatacgttgaatgtgttcttcttcatggtcacctaatactaatggcacacgctcaaccacagtatcggcatactccagtccgaaccaagatgcagggttagaagataaattctgcagccatactcttgcttcaaccatgaacttttcatagcctgtcaatttagttaatggactaattacgtcgttaacaattacaaaggcgaagtcccctacatcacgacccggtgtagtagtgaattgttgtggttgagcttcaatcgttccatcagcgatcaaatcatgaacaatttgccgcaaataaacatttacactggtttgttttctaaaacctaaatacaactgaacgttaattacattcttagtaccataagtattgaccgcgtattctgcagtatatggctcgttagtaacattaacagttacaaaccagtaagccttagcccgtttaggtctcttatccaaaattgaataaagcatttcgcgcttaatgaatttattatacttaaccttagccatataaactacattcgtagcgtaaactggataatcatcacagtggctcaactcagtcaacatatctgtatattcatctaagcgaacataagcattctgctcctcacgcttatcacggatcttattgccatagaaccacacgtacatgattgccaaaataaaaccagcaattaaaacagtgacgtaaccgccatgcaaaaacttagttaagcttgagaataagaacatcccttcaataaaggcaaagactactaagaaaatgcatcgtattgatagcgcggtaccttttttacccagatattcaaataataagatagttgtcatcaacatggtaaccgtgatggccagaccatatgctgcttccatatgatgtgaagttctaaataagaaaacaattgcaactgtaatgacacagatcatcttattaattgaaggaatataaatctgtcccttctcatttgaaggatagataatattcattcttggtaaaaattttaaactacttgcttcagctactaaagtgaatgaacccgtaatcaaagcctgagaagcaataatagcggcaatcgtagccaaagcaatagcaaacaatcttagactacttggtactgcttcaaaaaatggattgaaatcaccattaccagcatgataattagcattttgtaaaatccagacgccttgccctaaatagtttaaaatcaagcaaacaaacacataaggccaagagcccataatattacttttcccgacatgtccgacatctgaataaagagcctcagcaccagtagttgccaagaaaattgaacctaaaatcaaaatacccactttattagcaggactaaataaaatacgcaaagcatgaattggattaattgcatcaagcaaactccaatcatggcttaagttcataaatccaatgagccctaaaaaagtaaaccacaggagcatgattggaccaaaggccttaccaatcacactcgttcccattctttgaattgaaaatagtaaaaccaggataacaatagtaatcaagataaccatatcttgcgacgaaactggaattacatcaccaaagcgcatatttttcaatccttcaattgaagttgtaacagtcacagctggagttaatgtcccatcagctaacaatgctgctccaccaattaaagctgggataactagccatttagccctctttctaaccaatgcataaagagagaagatccctccttcaccatgattagtcgccttcaaggcaattatcacatatttgaccgttgtcaataatgtaacagtccaaaaaatcaacgaaatggagccaacaattagttcacggttaacattactaatcccaccattttcagtcacaatcgacttcataacatacaaaggactagtaccaatatcaccatagacaataccgatagcaattaaaaggccagtaaaagacaccttttgcttaccagatattttattcataagtttttatcctctatttcacttaaaaattgaaatttttactagtatagaaaaagtctagattttttgcaataaaaatatatctttttgaaaaataaaaaagaagatgaaatctccttcagtcacttaatttactttttcttatcttcgatggtgccatcactatgagcaataattacttcgtcacacatatccaggaacaagccatgttcaactacgccaacagtatgatcaaggtaatcagctaaaccatgaggtgctggaacaggatctgcagccaaatcaataatataatttccatagtgagtcacataacgttgattgccatccatacgccaccgaggctttaatccttcttgttcaaaacgtttaaagttttgttcacaagaaattggtaaaacttcaactggtaatgggaagccgcttaaacgatgcactaattttgattcatcaacgatccaaatgatcttcttagaattgattgctacatttttttctaaagttaatgcaccaccgccgcctttgattccatccaagttatcggtaacccgatcagcaccatctacagttaaatcagcttgatcaatatcggccaattcactaactttaaagcctaagccctcaagttgttttttactacggttactagtagttacgatagccttcagttttaagccgtcttcatctttgcgcttacctaaagcatcaatgaaaaaggcaacggttgaacctgtaccaacgcccaataccatacctgatttaaccatggcagctgctttttctgctgcttcttttttcaaacgatcttgttcttgcttgttcattattcatcatcctccatcgcctgtttaacttcctgttcagttggaattgaaggctgagcacctaaacgttgtacggcaattgaagatgcacgacttgcaattttagctgcttcttcaaagttagataggccagaatttaaattgcttaccaaatatccaataaaggtatctcctgcaccagtagtatcggctgcttcaactttataagtcggtattaattcttcaacatcgggagttgaaatatacgcacccttatcaccataggtaataaccacgttttttacaccaagcatgtgtagtttttctgcattagtggccagcgttgaattatctttaattgcaatgccagtgatcttggcactttcagtttcattcggtgtaatgatatcagtatattgcagtaattctttaggaatctcatcaactgcaggagctggatttaaaatagtgatttttttggcctttttagcaatcttaaatgcttcaagcgtcacatctagtgggatttcgaattgagcaattacacaatcccaactcttaatcaaatcaccagctgcacggatatcttccactgtcagttcataatttgcgccgtgatcaataatgatgtcattttgcccagcttcattcaacgtgatataagcatggcctgtctttgctcccattgtggtttgcacataagttgtgtccacgccataactcttgagctgatgcgtgataaaatttccttcactatcttcacctacacggttaataaagtaagtttcagctccacttttagcagctgcaattgcctgattagcacccttaccgccaccagcagtagtaatgtctagcgcattaattgtttcaccaggcttaggaaagtcttttacatgtaatgttgtatcaacattacttgaaccaataactacaatcttcttcattatgagcatcctcttctaaaaatggatttattcaacctcaattataacaaaaaacgtattcaaaatattgaacacacatttttgaaatcttactgtaaaataccaccattaacgaagccttttaagcgctcagcttcccacttcaatgtatctgaatcgtcaacttgcgagatcttatacccaacgaaatatggtgaagcatagaatcgtggaataatcttgcaacaagtaccttgaccatcattaattggatagaaaaataagttataagaatcaacaccatgtgacaagactgaacgcacatattgtgtgcccttttgaatcaaatcggcccaagtatccaaattagtattatcatgtgtcaaaatatttacttcttggtagccttgaactggacgcgctgataagttcatttcaactgaacccgaacgcccgacttcaaatcctttaaagttatcagcgccaatatcgtgatagccatctttatgatataagcccacgatctgcatatgtggatgagttaaagaaccatcagacttgggaccaaaatttttataccaaagcacactctgataacggcctgaattattcattttttgaaaacacttcaagccaaacttcatcaactcttgattatcttcacgcgtataagttgaaatatctccctggtgatcacttgattcaattaaaattgtttgattagtatcctttaacgtagggtacttattcttcaaccaaatcttatcgccatctttttcataaatattaattagatgctgcacatcacaaaaaggacagccagcattctgatttccttgccgattaccataatcataatcatatggcttacgcttaccaattgaatattcatacactaaaggattcttgtccatatttttcacctgctaaaccaaagatatcatacatttaacatcattttaacaattttatcggttaattgtgaacatttttattaataaagctaggaatagtacgtctatctatgataaactacctttgtaaaagaaatacatgatatacatgagaggaagaatcatgaaattctataaaaaattggtacttactggtgccacagctttagctgttctaggcttgagtgcatgttcaaataataattctagttcatcttcatctaataagaagattccaactaagattaacaagaagactaccgttaccttttggtattcactaactggtaatgcgcaaagcagtttgcaaaaattgactaaagattttgaaaagaaaaatcctaacattactatcaagttgcaaagccaaggcggcaactactctgatttacaatctaagttggtttcaggtttgcaatcaccaaaggatttaccgacaattactcaagcttatcctggctggctttacaatgctgccaagaacaatatgcttgttaacctaaccccatacattaacaattctgaaattggctggggctcatatgctaagagtggcattaagaaagctctttgggatggtgcaaacatcaacggtacacaatatggtgttcctttcaacaagtcagttgaagtacttttctacaataagaccttacttgataagtatgatgttaaagtcccaactaacatgagtgaattggcttctgcatccgcaaaaatttaccgtgaaagtcaccacaaagtacgcggtgttggatttgatgctttaaacaattactacatgatgcaaatgaaggaaacttacggcaaagacttcaataagaacttaaactttgctgccaaggattccgttaaagccatcaactactacgctaatggagtaagagccggctacttcatgcaagctggtactgaaaagtacatgtcaactccattcaacaatggtcgcgttgctatgttcatcggttcaactgccaatgaagcttaccttaagcaaggacttaagaagggttacacttatggtgtagctgctcgtccaagcacgatgaacgtacaacaaggtactgacatttatatgttcaaaaaagcaaccgcaatgcaaaagtcagctgcgtttaagtaccttaagttcttaacttctaagtcatcacaactttactgggctaaacaaacaggctacatgccagttaatactgctgctatcaacgacaaggtttaccaatctgccaagaacagcaagataccagcaattattgccaagacctctaagaacctttacttcttaccagtaactaagaatgctactgccgcatatgatcaagttaatgctaacatgcaaaccattttagctaaggcaagtaaaaagcaatcatggaatagcgatatcaagactggtaaagataagcttgatgctgcttggaagcaataatttttcaaataaaatatctatcaaaaaaagaagttcagtattaattcaatgtcattaagttaagacattgacaaattatcgacttggacttttaagatcattcatttgtgatttatcgcatttgaatgatcttttttcatgccaaataaacccaaattttgtttagaaattaggctacacgatataaataatatacagctgatttgggtttgagatttcttttgtcttttcgtcctggtctgatcggaattgtgtaatgactaatttgaataagaatctttttaaagatttcagttgaagaagaaattatatacatagcctggatgacaaaacatgactgtttgaaattgatcgcatattgatacttgcagtttttttgtggtacatatgcttgagcatcaatttgactgactgcgttaaacataatcatgtgggcatagatctccatttcaataaatctatcctgcttggaatgaaactgtacgctacctaaagcatatttcaactttttgaatgaagtttcaatgccccagcgcaaatggtagatctctttgatcctttttaagggataatcggctctatttagattagttagaacaacttcccattcttctttgcctgatttaggatcattaattctaaatttacaggcacgaaattttattgtacataactctccaaagtcccagctgccatctttggtatttttagaccgatattttatatattgacggtaatgatggttaaccaaatgaacgttttctgtagccttatgggtttcataataataattagaggtagtcacccagcaagctatatccttatcacactcttgattaggcaactcagctacttccttaaatgcgccatatcccgttttagtacgtatgacataataacagttaggcaggcgattacaattttcaatcatgttaaagccggtataacctcgatccatagtaactatatatggtccgcaatttagctttttaagcatttgaacggcggctttacgttcatccatctttgacttaggctgaaagatgcagtcttgataagtattatttaacaggtcatagagtgcattaacatgaatttggcaatatggctttcctttatgattgagatttccaacgatattctctgatttaggattccagatttgattaaaatcagacccatcaatggcaaatatacgatatttatgatcaaataactggatattaaataaattctgattaaatacagttagaatatgcttaaaacatgcgggtgaaagctgacctttgcgttggacataagcggaagtactgactactttatcgttatttttaatagctttttggccaaaagctctaaacaactcactggtcaaatcttttccttgcatattaatagtagttttaatgactgtagctgcatctaaaaaccgcttcctagtgaaggcatgaggatcatcgataaaatcatgaatatgctttccagtatcattgataatttgatcaagacgatctaaaatatttctgtgaagggctttcataattaacaccagctttctggcaataattttgaaggtttaataatttaatcagagggcgaaaaggtaggttcttttcgcctttattttatgcaaaaaaagaaccaaatcataatgattcggttctacagagattagattcaatttgtcaatgtcttaacttaatgacattgagtattaattgaacttcttttttttacctaattatttactaaaaatggatattgaatttgatcattatcagttacattcaacttgtaacgagcacgatataaagccttttctaccgctaattgccctgcagttgtggccattgcaatcgaatatgacttgtgtggtgaattgatcaggatttgactgatagaatgcttaatgtatgactggattagaatgacataattcgattccttacatgcacgtaaaacattagaagcctgtttcatctcgataattcgagctactccattgtgtgcttcaatcaccttagccaagttagaggttaagctcttgtctcctactacaacggtaactcgttttttatcgaggtcaaaatcaattcgggaagcatagtcttcattttgcttttcagacgactgcttctcctttttttctaattgatgcaataaagacttgtgtctacctttagtcttgtgcttttccgtttctttatttttatccggcttttccttcttttctggaatagtaacttcagcttcggcataacgccatctaaccctaatgaaggatggatcactgactcgccaaacaatactaatcaggtcattttcgtgtaagttaaagtgacttacagtattcatgtctaagtataaaatagctttttcaggatttacttgacttaggtttttgccattagagtcctgcttgatgtataaaccaaaagaatcacggtgaactaccgctggaccaaattcgataatttcctcatctggcgcaaaagactttgcatgatgctcaactttaataattggacgattgccactgtcatttaagtgatctagcaaagtaactgtatcaccgttttccagcttttcaattctagtcaagtgttcattaaaatattgtactgaatgaccattctcatccactgcttctgcacctagcagcttacgtctaatctcatattgtttttcctttggtttagccacaggaattattttcttaaccacaggcttaggaataggagttatggtcgcatatttgtttttattctttaaaaccgtaggactcagagctttagcagcttcttcttttttagctttttctttttcaagctcttccttcgtttttttcggctttattttttctacagtattttcatcattttcttttttagtttctatttcagttttattttctagcttattctcagtttttatttctggctcattttttacagcctgatcagctttttccgcaattttaacgacttcattcttattctcaggtggattgcctagtactgcctggttatatattttactaataattttcaacgcaatcattgactgcttcagtgattggggatcgctccccgtcgcctgcattaaatcaataatatcttttctataatcaatcgtcatatatttaccttcttatttcttaaatatgaatattatacaaaaatttttaatgctaatctaagaaactgtcaaatcttttgtgtaaatagatctttctcgtaaattgattttttaattatttatttaatcaaagtaggattctaaggtgtcctgaacctgaccaaagcctttatgaattcgattgaaataacggtcattgtagctcattgcctggatgccaataaatgcatcaagcgactgttcagttggaaattctgccttaggcttagctttacgcttgatgacgttgttaaaggattcaatcatattggttgaataaattgaagctctgatttgtttgggataattgtagaagactagcagatcgggctcaatttccttcaaacctttgatgacatggctataagctttattccatttggcatagaatttgtgcaagacagctgcagcttcttttttgcttgtctgttgatgtatctgcttgaattcgttcatgatcttttcacgatcgtcgacgcgtactttagcgcagatattgcgcatgacatgaaccaggcagcgttgaaaatgagctttaggataagtcctggccaaggctgttttcatgccaacaacaccatcagaaagaaaaagctcaacttgcttcaagcctctggacttcatgttttgaagcatctctgtccaaacttcaatgttctcactaggagcaatgcagtagtcaatgacttccttatgtccattaggtttaatgccaatggcaatatatactgcttcacgctcaaacgtttctcggcgcaaaggaaggtatgtcgcatccaaatagacacagaaaaacttgtcgcttagcttgcgcttgtgataagcctcaatcttggggagcatctgcttggaaatatttgatacttgagctggactataatgactgccatacattttctcaatcaagtcagcgatttctctggtagttacgcctttggagtatagcttgataatcgtgctttccaaaacatcagagtgctgcttgtagtcaggcagcgtgtgctgatgaaactgaccgttgcggtctcgaggcacttgcacttcaattggtccaaactgggtatcaaccttgcggaaataagcaccatttctagaattgccagtattccagccatttctggcatagggatcatagcctagaaaggcagtcaactcagcttctagcaagttattaacagcctgttgtagctctttgcgcaataaatcatttattttgtctggattgaatagagcttgagcaaaatctttggtaaaatcattcatgaaggagttcttctttctgtatgtgtttttttgttcaaaccaatcatacgagaaaggaactcctttttctaatgtttaaagaaataaatttaaggaatcattcatccttacacaaactattttacagtctctaatctaattctttatagatttttatattatttttcctgtaaaaccattataataaaagtagttaaaatatcatttattaaatgagggagactactatgaaaaagaaacttttacttttcgtatcctttttagccggtttattgttcttggtatctacaccaacttatgctagcaagcttcctaaaggctatggtattgctaaaacctttaccacaccaaaagcaacccgtggcacctggtattatcgcgaaaagggtgataaaacaatttctaaggtaaagatcactgctcatagcgtagatggtaaaaagctttacgtaccttcacaaaagttcttcgagaaaaatgtttacaacgtttcagctaagaagcgtaatcagttcatcaaaaaaactgaaaatatttatgctgcagctaactataaaaagggcttcaatgtcaacaattgggttaacttagctggtgatggtgaatactacatccctgttactagaactgttaacggcaaaaaggttaaggcattaagaatagctactggtgctggtccttatactgctgcatatgcatacaaaactaaggcattggttaaataatcattgtctaacgaaaaagcaaattagcataatttgctttttttctacccaaagtcaagtattatcaatgatttaagaaaataaatttacttgttttaatgatgcgaataaggttaaagcaaataagagtttaaatttaagaaaaagcgaaagtaccacaaacaatgtcattaagttaagacattgacattatatcgacagcttttaaagatcgaatcattttgattcggtcttttttctttttaaaataaaaagtgagcagagtttatttgcctttctgctcactttcgtcatattatctggtctttcatagaaagctgtgcctcttatgaaatcccttcactcaaatattttaaagctgatggatagtattatcaataaaatcgctgacaacattcacgatttctctgtatctgatcaagcttttactcgctgtcgtaagctcaattccactgatttgattaagttaattcttaacatgggagctggcagcctgaattcggaaatttttcatgcttttcctgacataaattctagaatgactgcttcggcttttgaacaacaaaaggctaaattaaagcctgaatgctttaaagaaattatgttagaacttagccgggcaaataatgtactgcaattattagataatcaatacttagttgttgcgattgatggctctgattttgatcaaccttttaatcccgaatcagaaaatatttttcgaggtaaagatggtcgaatatactgtcaacttcatgtaaatgctctttatgatgtcttgaataaattatatttagacatggttatccaacccagacaaaaaatggatgaacgtgaggcagccttaactatgttaaagaaattagcccaacaagaaaaagatttcttagtcctgatggatcgtggctatattagctttaatttaattgaaaattgcaatcgattaaaacattgccactatgttatgcgatcaaaatccggagatggtgcttttaaagaaattgtagctatgtcgaatcatgaatacgatattgacttatcatgcagagtaacttcgtcacattattattatgtcacccataaagatacagaaaagtttcttcacctgattcttcacaaaaagcatcactataaagctgttcgttcaaaaaataccagagatcaacgctgggattttgaggatatgtgtgatgttagatttagagtttgtaagtttagaatcaatccaccaggttcagacgatgagtgggaagtcctcatcaccaatttagatcgaaatgaatatcctctagctagaatgaaagagatctatcatcttcgctggggaatagaaacttcttttagggagcttaaatatgacttaagcggcatacagtttcattctaaaaaagatcaatttgtttatatggaaatatacgcccattttgcaatgtataatgccgtgagtttatcaataattgcgagctcaaaaccgtatactcagggaaaatatcaatatcaaatagattttaaaatggcctgttgtatctggcgacgatattttagtataagtgataattcagataaaaacttcacacaattactgctggatgtggcattttatttaacgcctattcgaccaggaagaaaagataaacgaaatctaaaagttaaattagtagttggctttccttatcgtctagcagcttgaactaatttaaacgactatcttaagatggcttatttgtgctatcaaaaaagacatttatcgaataaaataattcgataaatgtctcaaaaagtgtcatcagattagtcaatgtcttaacttaatgacattggtaccacaaataagcctatgaatacttgtagtttttccataggttgcttatacttaagttgattatttgatttcagctaaagtcttttattttcggtggctatgttgtaatcatataattgatcatgtttgataagagcaaacattgtgcgtatcagtttatggactgatgcaatggcgattttcttatagccttgtctatttgaagatcgttttttcttgtcataataatcagttatatggcaaggctgcgtagcctttaccgtctccatttgagtaataactcgataaagtatttttctggcaatatgattgccatgcttggtaatgccaagagaactgtctttttcaccagattggtaccttcctggatcaatgccaacaaacgcatcaatttgagctgaagtgctaaaccgtcttagatcaccgagctctgctactaatctcactgctgtaattctagcaacccctgggatactcaaatagatggataaagcacgagcgtttactgctttagccagcttttccatgtagttaattacatagtcgcgttcttgctggagtgaaaataaattagaaatgttcctttgaatagctctaacgataatactatctttggaatcataaggataagcttctctagcaaaagcgtataatcttgtggttaagtaccgtgccctttgttgtcctattccagaaatagaattaagcatttgagttacctgtgtctcattcttttctagaacatatccagcatgtgggaaaagactaacaagcgcccaataaattctgccagatggatgagacagtatttcttcaatttgtgggaaagtggattggaggttgcggtgcaattgatttttagtagtaactatactcctagtaagttcttcataatagcgactggcattctgaagttcatgatactctctgggctgtggatcacgcagcttttgcggggcattaaattgaattaaagccaggcgataagcatctaccttatcagttttattatggcgtaaattattgtccattagctttttcgctttaagcggattaagcttcaaatacttaatatgataatcctctaagaaagcttgcaggcttagagaataaacaccagtagcttcgaaaacaactaaaggagttatcaaatattggttcagttgctcataaagtttttgatagccaaaggaatcattagagattctaaaagattcgccttgtttgatccggtcattaaccacacaaactgtggaagatttactgctaacatcaataccgaaaataatttgtgattccataatataacctccgctgtgaagataaacctctttatcaacctattaattctaattttctaaacacggcatctaagtgcccacagacttcgaagagacttaagaataggtggtaaagcagtccgtttcttttacgacatcaagtgtctaaaaagctgaagacttgatttgctttatcttcactttctattttagacaaaataaaaagtgccagatcgtgaatccgtcgattcatgatccaacactaggttagtatgtttcttttaccgatttttacttttccgtatttctccttcaaaaagagcggtcaattttgccaaactcttatgatcaggatagcgttgaactaattgctcaattttatcggtagctaatttttttacttcttcggctgagcccattttctctaaaaaatctgccaaatcacctgaacgagcaagtaacttacgctcactacgactttctgccagaaaagcttgatcaaccttacgtaacttcaaactaccatctgcattaaagtgatatcctccccacatatgctgcttaattggttgcatcggttcgctatccacataacacaatttccctaccatatggtgcgtctcagtaattcctaacgtaaccgggtcataaatatcgacatagttaaaaattttctcccgcattttagccacctgacgtcgttcagctggcgtcagtaaaagccaaatattggttccttcatacagataaacagctgcaattgcttctggatgacgacaattagctaaagcaaactgagcattaattgaacctaacgaatgaccataaatataaattctactacctttaaattgattaattgtctgattcaataagtgagcagctgattttaattggctaggaatcgtccgttttcgtgcaagcagtgcttttaaaattggtagattagttttaatccattcatcacgccaagtttgtggagtcccctttttaaaaccatatgatcctttaaataagattgttatttcattcggacttgaaatgacgaaggctcgcatcccatccttagcataaacattacgacaaacagttccaagataatgttgatctattttgatagtatcacccagctgcaattcatcatatgcctttttagttaattcaactcgttcacgatctgttaactgtgcatttacactcataattttccctaaaataaaaaactaactcttactattatgttagcatgagttagtttttttggataatttgagcctttaatcatattttttctgcaagtaatttgcaatcgttgacaagcagaaacagacaataaagtacatgattgcaataatcacatacattggaattaagtaagtcgtgttctgactgtaaataatttgtgcgtggtataaaagctctggcaaaacaatgatagttgccaatgaagtatccttaaccaatgatacaaattgtgataataatgccggaatcatattgtgcaaagcttgtggcataattacatgatacatagcctgaccatacgacatcccgttggaacgggcaccttccatttgacccgaatcaactgagccaattcctgaacgaacaatttctgctagcattgcaccttcaaagatgactaacgctgcaattgaagctgtcgttggattcgttacaatacctaattgaggtaaaccaaaataggtaaagaagatgatcaacaatagcggcaagtttcgaataatatcaataataaagcctacaattgcagacacatacttaattttcatgtagcgaactaatcctaagattaatcctactacgaagcttaatgcaattgaaattaatgaaacataaatcgttaccccaagtccttgtaataagaagcggatatcgacccatgaatatgcatgaataaaagtttccattctctatccctttcctattagttgactaattttttctctaaatgacgcatgtagtaactaagcggcaaagtcaagatcaagtagaacaatccaacaataatataagtatcaattgtttggaacgttgagaacgcaatcaattgtgcttgatacatcaagtcaaaaccggcaacaaaggccaaaactgaagagtttttaaccaagttgacaaactggttgcctagtggtggaatcactatcttcatcgcttgaggtaagatgacataacgcatggcttgcacataggtcataccgttggagcgagcaccttccatttgaccagttccaattgaattaattcccgcacgaacggtctctgcaataaacgctgatgtataaagcgttaaaccaattgtccccgcttgaaatcctgacaatttcacaatataacgtggaacgatcaaataaaagatcatgacaattaccagcaaaggtatatttctaaaaatcgcaatatagatcttcgcgatcacttggccaaatttagatggtgctacctcaagcaaggcaaaaatcacgcctaaaatcaaactgaaaactagagcaataatactacttaaaatagtattccaaaaacctgttaggaagctgccccagttgttagtaataatttgccacattatttcaaaaccccctttagactaaaaccaggaattccagcaaaccactttttaatcaaacggtcataagtaccattcttttgtaattcattcaaagcttggtcgatatgatcagccatttgtttttgtcccttattaacagcaattccgtaaggagcattactatagacgccgccgactaacttataaccaggattttcttgagcgataccggcaagcaaaccgttgtcagtagttaatgccacaccttggttagccttcaatgcagacattgcttgaccatagtcatcatattgcaaaatccgcgctttaggggcatacttatgtacatcatcaactgcggtagttcctttaacggccaaaacagttttgccttccagatccttaacattcttgatcttactattattaggcactaacaaagatgaaccggctggaaagtatggcttagagaaggttacttgcttggcacgttctggtgtaatagtcattgtggctaaaacagcatcaacatttccattttttaaaagtgggattctagtgttggcagtagtagtaacaaaatcggttttagcatctttatctagcatttgcttagttaaagccttagccaaatcgatttcaaacccttcaatatgtcctgtcttaatgttcgttaagccaaacaatctagtatctgctctaacgccccaaacaattgtcttactttcttttaccttttgataaacattattgctagcatgcttgccacaagctgttaaggtaaacgctaatagaatcagcaaaggcaagaaaagaaatctttttatctttttcatggcgtgtcaccttaatctttagaaataactttgcttaaaaattgccgagcacgttcagtatctggatgagcaaagaattcttctggcttgcgatcttctaaaatatgaccattatcaaagaaaattaagcgattgcttacttctctagcaaaacccatctcgtgggtaaccacaaccatagtaatgccttgttcagcaacatatctcataacttctaaaacatcttcaatcatttctgggtcaagggcactagttggttcatcaaataaaatcaccttagggtgcattgctaatgatctagcaatcgctactctttgtttttgtccaccagataattgacgaggataagagtcaattttatcggccatacctactttttcaagatattgcatcgctactttacggttctcatcatcaggacgctttagcacaatcttaggcgccagcataacgttctctaacacagtgtgattattgtagagattaaagtgttggaataccatcccaacatttttacgaatcttattaatatcggtctttttatcagccaaatcatacccagttacaattaattgaccgctattaattggttccaagccattcatagttctaattaaagtactcttacctgaaccagatggaccaataattgaaaccacttggccttcatcaatctttaagttaatatctttcaatgcatggagctttccgtagtacttatcaacatgcttaaattcaataattgctgtcatggcttctacctttctttcctttgtctacacaatataattattttactcttcttaaagctaaaactaaatattttagcaattcaaaatagtataatagcctgctaatcttataaatttattcggttttagcaaaatatatttgtatttagctagattaaaataatcatattaacgctacttacgaatttattaactactaacttttaggataaagaaaaagtccctcatccctaaactgggacgaaagacttctttccgcggtaccacccacattgcctattagatatagacctactcatgaagcactatcatgcttcaccggtgtggtaacgtaccggagacgtctcaacctactctaagaattgttatttcggtgagctgctaaaagtgtttttcaatagttcagggtctattggcttttcactagcaccaactcactgttagaaataaactatctacttgtctttttcatagccttttaatttatttatatgtatttaaccttattttgggataaaaagcaagcaaaatttcttatacttcaaaatgaatccgtttttaatacaaataaatgctgttaatattcggaaaatagcttaaaatatttagtgatatattgaaaaacaaaggagtttgaaatgggaaaacttgaaaaacccgttatcattggaattgccggtggttctggaagcggcaaaactatcatcgctcatgaaattgcggataatattaatgatcaagatcgcattatgatcatgacccaggattcttattataaagataacgcgtggtgctagttaaatcgttctagacaataagccaaattataagctaaaattgcaatttccaaccggctttgaaagcctatcagactacgtgctcgattgttctcggcattgtaataggtcagaagcgaaaagtcgctttcaattgttctgcgaatagccatcaattgatgatcattgtgctttttagctcctgtcatatttttacgatatggtgtccaaagttcgtaacccatttgttttagctgttgatgcagttctttgcctaaatagccttcgtcgccaagaagatagtaattagatggatgggtattttctatcagttcaactgtctccctggcatcatgaactgatgcctttgttacgacataatcaagaatgtaaccgtcatcgctaacaatggcatgaactttgaaaccatagaagtaaattttcttggtggccttataaccaatgttggcataaccgcgaaaaattttagcacgatagtttcgaattggttggcaaacaggtaccggaaagctgtcaatgatcaagaactgtccattcaggtcaacctttttattcatttcttgccgtatctgataaatcaattgcaatagctgacgtgaacgccgattaaaacgtgagtgtgataaacaattgaaacattcacagaatcttctttgtgattcaattcctgtcttagcttgccagataagtaaagccaaaatcagactgtccgtagttttaatttgatcaatatttcgccgatgagtaaactcagccggtgcatacaaacgataccagtgccgacaaattatcactaaatctttaaaactaacttgtaaatggtggctaaaacgcttaagcttaaggcagttcaatcagatcagactcttttctattattactatttacaagtcgagtctaacaagattggacttttttattaactaaaacgatttaactagcaccacgcgtaaagataatactggtgtatcaatggaagaaagaatgaaaattaattatgatcatcctgatgcttttgatatgccgctacttgaggcacaattaagtcagttaatgcacagaaaaccgattgaaatgccaacttatgattttaccgctcatactagaagcgatgaaactattcatgttgagccggccgatattattatcttagaaggaattttagtcctcttcaatgaagatattcgcaatttgatggatattaaagtttatgttgataccgatgatgatatccgttttattcgccgacttgagcgcgatatgaaggaacgtggtcgttcacttgactctgttattaatcaatatttgggtacagttaagccaatgtacaaccaatttattgaaccaaccaagcgctatgccgatatcatcgtacctgaaggtggggaaaatgatgttgcaattgacatgttaactactaagttacaatctgttttgaaataagcagcaaaagacctgataatcacaaagcgaagattatcaggtcttttctttattctaaattatcttaattttgattatcatcttgtgcattagctgtgtccaaaattcggttatacttcttggcaaagaagaccaaaagcaagacactagcaataacataaattaccgctgcaatgtaataggcatttgcataaccatcttgggtagtaaataagtaaaattcggtgaagagtccatcaatgacaccgacaacagcataagcaatctgaaccacaccggtaaaggctggacgcaagtccttatcaacaataaccatctgaacttcttgttgaattggcattgtggcattggctaatcctgttcttaagaagagcaaaagaccgacaattacaaacaaaactgtcccgctacctaagcgacgaccgttagctagcaacaacataactggcacacaggtcaatgtacctgcagcaacagaaacaatcgcccccatcttcttttccaagaatggcgcaaagaaatatccaattagcatcgctgcttgaacaaaggtgttaatggtagaagtaacatcacgtggaatgtgcaaataactattcaaataaatcggcacataaacagcaactaaacgagcaccaagttgaataccggcaatatagacaatccacatcaatgtcttcttgctcaaaagctttttatacatagccatcttctctgctctgctaggctccttgtcatctgcagtagaacgataatcacgtggcacatcatgaataaacaaagccaaaacaaaggctaacatggttacggcagccgtaatgtaaagcaggattctgtatgaatttgtataatctgctaaagtttgaccagttaacatctctgacttaccagaaagaacagatgcctcatgataaggaatgcctctaatcaaaccaaagaaccaaacgacagctttcccacctaaaaacgtacagatcgtttgtgtaatcaaattaacaatcattactgttgagaacatcttagttctaatttttcccggaacatatgaggtccacattaatggatacatcaaatcataaaccccaattgctgtccaagaaatagtataagcaatcatgataacgagctggttagtcgtgatacaagttaaagccataaaaatcgcagtcattggcggcaaaatcaataaaatcttgcgataaccccacttgtgaactgtagcgatcattactgacatcaaaatagcagttgccgcattaaaaatgtttaatccagaaatcaggtgtggcgctacaattttgtaataagatagagccgcatcattcgtaatcccagttactgcacccaaaatgccgtagatccataaataaataataacattatgtttgtaacgcggattccagttcttaattgcttctgcctcagcttccttttctgcattacttcgtcgagccatataaatcccctttttttgaaaacgcatacaatacatctaactttattctatcactcaaatggtattaataaagtgtgtgtatacgaaaaggtatggtttatagtttctaggcaactttaggttttaatgctttatcgaaaagattggtaatcaatttcactaggacaccatcaaacagtaatgatgaaatcatacttacaataaacatcaacatttgtacattaacctgataatgactccaaccaaacaaaaagtaacttggtataaaaccacctaaattggcaaagaaagcaccagtcaaaacgctcttccatgagaacttttcatagcgttcttttttagggaaaaagccgatctcgttcattgctccttgaattaacccctcaaaaatagtcaaggctccccactggccaccgatcgccatctcaaccgtggcagccagcaattcaccaatagttccagctcccttagttggtacaaaatacatcgctaaaggagcagccatataccataagccagtaaaaacgttgtcaacaaccggtgcataaccggtgggtaaaaagcttaattttactaagttatacacattgttaaagccataagtgtaaatcacacccatgatgatcccgattaaggcaactaaaataactgattttacattccattttgacgatctagtaaacataaaaaatgctccttactaacatactgtcagtaggagcacacaaataaaagttaattctcttgttagcactttcccttgcgcaagtattatcttgttcaggttcgaagggtattatctcagcattacgcacccctagtgacatttcatttatttatcaattaagtcaagtatagcacattgttaatcaaatgccatttgatctgtgtaaagtttgtaataaaatcccttttctttaagcagtgcctcgtggctgccttcttcgatcacattaccatcttttaacacaacaatcttattagaattcaagatcgtctttaaccggtgagcaatcacaaagcttgttcgtccagcaatcacagtatccattgccttttgaatcttttcttctgttaccgtatctacgttagaagttgcttcatccaagattaggaatggtggattcgttaaaattgtccgagcaattgacattaattgcttttgcccagttgaaaagattgagctagcatcgctaacttgagtatcgtaaccatcaggcaaagtctcaataaaatcatggatattagcctgcttagccgctgaaatcacttcatccattgaagcattcggcttaccataacgaatattgtccgctacagtaccagtaaataagacagagtcctgcaggacgatcccaacattatttcgcaatgatgttagttgaatatcacgtacatctgtcccgtcaaaggttactttacctgaattaacatcatagaagcgatttaacaggttcataatcgtagttttacctgaaccggttggtccgaccagagccactgattggcccttatcaaccgaaatatttactccgtgcaaaatttctttatctttattgtagccaaaatgaacattttctagcttgacaccatgattcaaaccactaatgaccttaccatttggcacttcgttttcatctttttgttcttcaactgtagctaatcttcttgccccagttaaagctaattgaatcatggaataaattgaagtaatttgtgtcaaaggttggaaataaacttgtgaatattcaacgaaagttacaatcaagcccaatccaatagcctgagaaatttgaccggaaataatcatccaagaccccatagcgatgacaattgccaaattaagtaagttcaatccgttcatcaatgggaataggattcccgaataaaattgccccttaaacaaaacggttcttactttattgttgtagaccttgaagccatcaaccgattcttgacgcaaaccattggtaataatcaccttttcaccattgatctgttcggtaatataaccatttaaatcgccaatttcatcttgctgcttatcgatataaacgcgagcttttttcattaaaaggacactaataatcaaaatgaatggtgttgtcgcaatcgtagtccaagccaaagtactattaatcgtgaacatcacaataattgttcccacgaacataattccctgggaaataatttcaaaaatcgcattgttcattgcgttgaaaatattatccaaatcggaagtaaatagcgataaaagtttaccatcctgatgagtatcaaagtagcgcactaacatccgttgaaacttggcaaatagattctcacgcatgtcattagttgaatccgcattgaacttggacattaccatccaagcaataaaaatcgctatctggctcaataagtaaaacaagaacatcgaccataacgcgctatagaacgtgttcatggatgctgtacccttttttaaatcaaccaaataagtagttaaagcggtaactgaacggcctaaatatgtaggtgccataacctgtgcaccactcgaaatcaaagaaaggataaccacaatagtgattcccttccaataaggcttcaaatacttagcaaaatagcgcaatgcctttttcgtattactcatttattcatttcctcctttcttacctttttgtgtcttgaagatttcttggtaaaccggcgaagtcttaagcaattcttcatgcgtaccttgtgccactaatttaccgtcatctaacactaaaattgtatcggcattaatcactgaaacaatcttttccgcaatgatgtatcaggcagctcatgctctaaagcttgctgtactttcttctcactttccgcatccagagcagaagttgaatcgtccaaaatcaaaattggtgctttagcaatcaagccacgtgcaatagatagacgttgcttttgcccaccggaaaagttagcagaacgctcctctacttcatgatcgaaagaatcgttataacgctcaataaattctgatgcttgcgccatattggcagcacgctgcaattcatgtaatttagcctgagcattaccttgacgcaaattagatgctattgtacctgagaaaagaactgctcgctgcagcacaaaagaaacagttttgcgtaatgcagcttcagttacatccttaatattttgaccgccaatttttacttcacccttagttggatcatataaacgagcaattaattgggccaaagttgatttaccagcacctgttgccccaacgataccaaccatttgacctggcttaatcttaaacgaaatatcctttaaagtaggatcatccccatcaggataagtaaaggaaacatgatcaaactctacgctaccgctaagaggtgcaaccgaaccactttccacaaacttgacatctggttcagtctccaatacctcacgaatacgtccaagagaaatattagctcttgaaaattgcattaaggtcattccggcaatcatgatcgtaaatagcagggttaaaacatagttcacgaatggactgactaccgcaatatcacttggatgtgccgtaatatttttaccaattaaataaacaattaaagcaattacggtataagcgatcatctgaaaagctggcataattgcagagaaccagtaaccaatcacaatgttgtagtcattcaattggtccgaagtttgatcaaactttttaatttcttgtggaccttgattaaatgacttaaccactctcacaccttgcaatgtttcttgtgcttgattagaaattcggtccatcatttcttggaatttggtaaacaaactattcatttgtcttaaaacgtaagcgccaaaaccaaaaataagtgcaaccatgaccactggtgcccaccagaagcgcggaataatcaggatacagaagataaatgaaccgacaattaaaatcggcaaccgcaacatctgcataaatagctgcatcatcatgttcattacctggttcatatcgttgatcaaccgtgtagttagagaacctgctgaaaatttcttaatattaccaaaagagaacgtttgaatcttagcataggtatcttcacgtagatcactaactactccttgtgcaattttcgctgcaaaataaacgttaaaaatacccgaaataattgcaattatacctaggactactagccagattccatcagacaagactgcttgcttctgattcgccatcaatgccttttgaatattttccaataatttaggctgatataatccagaaaacgctgaaactaagatagcaataattgcacaaacaacatcttttttataacgctttaagtatggaagaattattttaaagttttccatttttactcctttcttcacttaaaaaatgccaaaaagtagtgctccattcttctgaaagcttagctaacaatttcattttgtcagttcccatggcttgagccgttttttcctctaactcaaatagaggacgcaacctgtcataagcatatttccgccctgcttcggtaagctggcaaaatcgaactcgcttatcgctaggatcaacagtcatcgtgatatgatcatgatcacgcagaatcttaattcctttgttaatcgactgcttgggtaaatcactcagatttactaattctctttgtgtcaattttccccgaatcagtaattcatacatgattaccactaaatagtccggcaagtcatgatcctgctcccattggctataagcacggctgccatggataattgatagatttaatttttctgtctcactaattttcattacttcaccaccatatttagtctacatgcatgccaaatatattagtatgcacatggactactaagtgtataattttttacggtaagttgaataaataattaaaaaagcccaagtcctttgaatttggacttgagctcaaacaaaaagaccagtagtctgatgttaagaacaaaaaacacattagaagctggtcttttatgaattcaattgtaactgaaatcgcaaatattataaagtctgaagataattatattaagcgtgaaagaaaaataatctgtttcttcttaaacctgattaaggaaatcatggccttggctttagctaaagttgatgatgaaatgattaccaaggttaaagcacagggctatcagattgataagaagaatgagcgctcaatcaatatggcttttggcgaagttaggtatgtctgcccaggcaaacaagcaaggtatcccttggatgaattaatgggctttgacaaatacaagcgctacagtattttagcagtcaaaaacatcttagaagtaagcagcgttgccacttatcgcaatactgctctagcagtcaattgcctgtctggctttaatattagccatatgcaggtgggcaatttggtaaaaatggccgggaaaaatattaaagcgggccaagaagcagattcaagatatgatgccgcaggcactaagaaaaaggtcccagttttgtatcttgaaggcgatggcgtggtgatcaaaggcactaaaagccggttggaatttcatcgctatcaggtctgtgaaggcattgtcaatataagcaagaaacgcagaaagcgaatcaatgccaaggaatttgtttctttaagccgacttgatgcgctgaacgaagccaaggagtacctggccaatacttatgatctttctgatactgtaattcttagcaacgccgatggcggtgctggatatgccaaaacagacttcgatgacattgtagggctatgcaagcgtcatgagcatttcttggatgtctttcacctaaataagaaaatcaaagaaaggctatattttgcgcctgacctgcaaggcaagctgatttctgctttggaatacaaatacagctatgacaaagttaaaactatcctaaccactgcagaaagccgactaattgatgaattgaataccgagctcaatcatgattatctggggcgcctaaggaattatattgatcgtcattgggacgatattaagccgtttaagaaacgaaaactgactgtgactaaagccattggctgctgcgagagcaaccaccgcaagtatacctaccgtgttaaggggcaaggcaagaaatggtcaaaatctggagcagaaggcatgcttaggatcttaagctgcatcaagaatcgagagctggaattttggcttagcagcgagtttgaagattcagaaataactgtattgactgaacaggaattaaaagcagcggcccgtgacagcttaaagaagcgtcatgaagttcatttaggcatccagcatggcgcattaaccgcacaggtagctggcaatagttatttaagcaagctaagcagaaatttaagtcatataaatatttaagaaattaaggttagactaatggtttaaaggctaccgcaaaaacattgacacttaccatggactattgtcaaatcattttgtcaaaaataagactataattaaagtaaagaaacaatttttgcatctaaatttcaaattggtataataaaaaaatcatcaagtaaaacaaggcagggattatatgcgtaaaaagtttttattaataatttcaatagtggtcctgtttgctttgccattaagtggctgtaagcaaaacaaaaagcaaaacgtttatcaagcagttaaaactagtaaaaccattaactggggcgtcaaagccgacacgccattattcggctcaataaatattaaaacaggcaaacttaatggctttgaaattgatttagctaatgcattaacccatgaaatgctaggcaaaaatgccaaagccaatttcataacaacaacggccaacaccaagattcagcttctaaaaaacacgaatgttgacgccgtcattgcagcaatgaccattacgcctgaacgtaaaaaacaagtcgaattcagtcacccttactttcctgctggacagtcaattatggttgctgacagtagcgccattaaaaatgctaaaaatttgaataacaagaaagtgcttgtagttaaaggaactactgccgccgatgctatccatcaagttgctcctaaagcggaaattttacaattcgatgattacggccaagcttttgccgcattaaaagctggacaaggagatgcctttgtaactgataacggaattttagctgggattttgcgtgatagttccggctataaattagttggcggcacctttaccaaccagccatatggtattgcagttaataaggggcaaaatgacatgctcaagcatatcaacactgcattagcaaaactagaaaagaatggcacatataatcacctagttaaaaaatggtttggcaacattcctggtatgaacattaaagaactagaaaagaaataagaaaaaggctaagatcaaaattttgatcctagccttttcgcttatttagcaatgaaatcaagtaaagtaaacattacatctttatttttctcaggcacaccatgattaataatctctgtaggcgtttgatgtaaatcattattttctaaagcatatgctccatcattaatagcaatctcacgcacattatcaatttgcggttcaaagtggaactgcaacccaattacattatctcccagtaaaaagccttgattcttaactagatcactagagaataataacttagcttcggttggaatttcactcatttgttcatgccaatgaagagctgttaacttatccggaattcctgtaatagtctgatcttgcaaataaactggtgcccaacctacttccttagcgggtgcatcaagtaccttatagcccaaagttttagcaatctgctggctaccaaaacaaattcccaagatcggcttgtgttgatctaacatttgtctaatcaacacacgttcatttttgacccaattaagatcatcattaggactgtttggactgcctaggactactaatagatctgtttcatcaacagttggcaaaataccaaaattccctggatggtaaacgaacatttcgttatctctagcatggcaccaggcttgaatagaaccaggtccctcattaggtgcatgctgtaatacattaacgcgcatgaaatccctttctcactcaacaatatttttgtttttcattttatactcaattctagtggtaaacaagaagaattcagttaatcttttactgtatctttagaaactatatgtcaccttatatgatataatgttatacatatttttacatctggaggacttttatggacaatcaccttaaacgcagtattggcttaggttctgcactttcaattatcgttggaaccattatcggttctggaattttctttaaacaagcttcagttttagatagcgcaggctcaacctttatggcacttttagcatggattttagctgggattatcacattaaccgccggcttaacgattgcggaaatcggtgcccagatgccttatactggtggactttacgtctatattgaaaaaatttacggccgcgttttaggttttatggctggttggatgcaggctattgtgtacggtcctgctatgatagctgcagttaccggttttttaagtattatggtgactaatctctttggcatcggcaccgaatggcgtattcccattggtttgatcactatcatcgctatcggcggtttaaactttttagaaaataaagtcggtgcagcctttgctataatcactacaattgctaagatgagccctatttttgcaattatcttctgcggcatctgctggggtgagcaaaacgctgtcgcccaaactgtgactgagctcaacaggtggtcttggcgtagccgttctcgctgccctttttgcctatgacggttggatctttattgcaaatttaggtggtgaaattaagaatccacaaaaattattacccaaagcaatcatcattggaatcactacagtattagtaatttatgcgttaattactattggtatttttagtttcatccctgccgataaaattcatgcattaggtcaaaattcaaccacttatttggctgacgctattcttggtccaattggcggtaaagttctatctgtcggcattattatctcaatgctaggcactcttaatggagaaatgctcacctttccccgtgttatttacgctatggctaagcgcggggatttgcctttctcaagatttttatcatacgttacacctaagggaaaagcaccagttatggctactatgctcttaattgccttaactggaattatgatgactttcttcgatcctgattacctatcaaatctctgcgtcttcacaatttatagtttctatgttttagcattctttggcttattcattttaagatacaaaaataaggaccaacgtcctttcagcgtgccattttatcccctaattcctttagtagcaattgcaggcgggctcttcgttttagtcagccaattcttcaatgatcccgctggcgttttgctttttactggaattaccgctgtcggctggccaattttctttttagttaaaaagatgagcaaagcacagaacacgattatcgaagactaaaaatctcaaatttttcttgttcatttttaataattatgatattctaattaaaattaatttaggagattcaattatgatttatcaagacaccacattggcatactcatctagctcaagttccaactgaacttgagtgattttggtgtacgtaaatcagcagccggattcactcaatcgtttctagacgataaggtgaatccggctatttttgtataaaggagaaaaaatggacaacaagcttaaacgcagtattggtttcggctcagctttttcaattgtaatcggaactatcatcggctctggtatcttttttaagcaggcttctgttcttgacagtgcaggttcaactacaatggccttattagcttggatttttggtggtctaattaccttggctgcaggtctcaccattgccgagataggggcgcaaatgccctacactggtggtctttatgtctacattgaaaatctctatggccgcattttagactttatggctggttggatgcagatcatcgtgtacggtcctgcaattattgccgccgttgctggttttatgagcatcatgatgactaacttttttggtttgaatcattcatggcgcattcctttggctttaatcacagttttagcaattggaattatgaatttcttcgaaaataaggtaggtgcaatcttttcggtcattaccacgattgccaaaatgattccgattgctgtaatcatcatttgtggaatctgttggggtcaacaagatgcgattaaccagactgtagcagaggttagtcaacacactagtaacttcggtgttgctgttttagccactttattcggctacgatggctggattttaatcgctattttaggcggcgaaatgaaaaatccccaaaaattattacctcgagcaatcattgcaggaattacagctgttttggctatttataccctaattacaattggggttttccgcttcatccccgctaatcaaattcaccaactaggcgaaaacactactacttatctagctaacgcggttttcggtgcaatcggaggtaaaattctttccattggcatcatcatttcaatgatgggaacattaaatggaaaaatgctgacctttcctagaatcgtttatgccatggctaaacgaggagatctacctttttctaaatacttagcctatgttactcctaaaggaaaatctcccgttgttgctactttgtttatcgtccttttagcccttttaatgatgattttctttgatccagaccacttatcagatctttgcgtctttacagtttattgcttctatcttttagccttctttggaatttttatcctaagaaaaaagaataaagcagagcgtcctttcagtactccactttatccttttgtgcctataattgctattttaggcggtttgtttgtcttaatcagtgaattaattaatgatccagctggtgttttactttttgctggaattgtcattattggattaccaattttttacgccgttaagcgcatgaacaaacatcgtttgcattaaagcgacctttctacactgtagcttgctcgccacaactcttccattttagctaaacgatgccaatcccctttttgacacattgtatataaagcatgtgcaggatcataggcaattggattaccttctgtttccttcaaataagctccaacaatgttgattaacatcatccgaaagcgttcaatttcatttcggctaaagtaagtttcaaaatacttgctggttaagcaatcaaccgttgcttgcgaggccttatgcaaagaagccggattcttacgatagttatataaagtataggttgaaattcctgttgccttacttaaactagtaatcttcacattgcgatcagttaccaatttttctgctctttgtacatcggttaaaattttcggatgcttaatgtgaggaggcatcggaatacgtttgcttaactctgcaattactttttcagcagcttccctcatttgctgagtggctactgtctcacttaccttgtcatcaagcaattctcctacaacgaaagtatgatcagtcacttcataccttctagtaattgcattgtaaaaatggccttcaacccctgtgatcttaactgcatcagttccagctttctcatagtcaaaaaagatgtgttgttgatcaccagttaatggtgaaaatggtaaattatctaacgtaaaaacttgtacatttaaagtataatctgaatgaacggaatcttctgcatcactacgatacattttcacttcccgatcatgaataaaatcttcaaaaataagattttttccatatttttttttcatttcttaatccccttttatatagtcctattatccattataagcaaaaaactagcttttaaaagctagtttttgtttttattagaaaatattcggtttagggcaaataattaccagcagctaagtataaatcgtaccactcttgtctagtcaatcgaatcttggcacctttagcagaatccctaatgtgttgcggattcattgatccaactagcatttgaatatttgcaggatgacgtaaaatccaagctgcagcgatcgcatttttacctacctcatacttatcggccagtttttgcaactcttgattcaacttggggaagccatcattatcaatgaaagtcccttcaaacatgccatactggaatggtgaccaagcctgcacagtaactttgtgtagacgggcataatcaagaaattggctatcacgatcaactgatggtttatctaccatattcatatgcatcccaaagtcaatcattcctgtatgtttcaggctaaattgtaattgattgaacatcaagcgctggctcaagcaactttgtaacaatttaaattgagccgtatcaaaattagatacgccgaaaaagcgcaccttacctgctgcctgtagttgatcaaaagcctcagctacttcttctggatccatcaatgcatctggtcggtgaagtactaatgaatcaagataatctagttgcattctttccaaaatttcatcaacactatgcaaaatatgttctttagaaaaatcataacgttttcctggaacaattcctgttttagattgaataaacatctcttcacgcttgatctgcatttggctaaaagcttgaccaaaaatctcttctgattttccaccgccataaatatcagcagaatcaatgaagttgatcccagcatcataggcggcttgaattgccacttgagcctctggaactgatttttgattcattcgcataatgccaagtgccatcgctggaatgcttaaagtagtacatcccattttaattcgtttcataatgtaagtcctttcattctttatttacctcacatcatgaaccaaaaatagctaagtttcaaccacaagaaattcaataatcttttattaatatatcttagctactgccgattgaattgattctttatctaagaattcgtcataacttgtatcttggcaactaacaatacctttaggtccaacttcgataatgtggttagcaatagtttgaataaattcatgatcatgtgaggtgaataaaattgaacctggatatgaaacaagggcatcatttaatgcagtgattgactcaagatctaaatgattagtaggatcatccatgatcaatacattagccggttcaagcatcatacgtgacaattgacaacgaaccttttccccaccagaaagtactttgatcttcttctcaatttcttctccactaaagagcattcgacccaagaacccacgcaagaatgtgttatcatcttgttccttagtagcatattgccgtagccaatctaagattgtaagttcatcattattaaagttagcgttcaaatcgcgtgacatgtagttaaaggccgttgtttgaccccatgtaacggtaccagtatctggcttaagcttaccagcaacgatatcaagcagcgcagtcgttgctaaagcgttacgtgataaaaatgctaccttatcaccaggacgaacaataaaggaaacattatctagaattttttcaccatcaactgaataagaaacattttctaccttaactaggtcattacctaaatcacggtgcatttcaaactttacaaatggatacttacgactagatggcttaatatcatctaaagtaatcttatcaagttgtttcttacgagaagttgcctgacgtgatttagatgcattagcagaaaagcgggcaataaattcttgcaattgcttcatcttttcttcttttttagcattttggttagcagctaattcattagctagtttgcttgattcataccaaaagtcatagttacccacataaagctgaatcttaccacgatcaacgtcacacatttcagtacatacttgatttaaaaagtgtcggtcgtgggaaacaacaatcacaatgttagggtaatcagccaaaaagtcttctaaccattcaacggtatgaacatccaaaccgttagtcggttcgtccaatagcaaaatatcaggattaccaagcaaagcttgggccaataagaccttaactttttcgctttcaggtaaatccttcatcatcatttgatgttcttcttcaggaatccctaatgattgcagcagcttagccgcatccgcttccgcattccaaccatcaagttctgcgaacttgctctctaattcagctgccttaaccccatcttcatcaccaaagtcaggtttggcataaagagcatctttttctttcattacttgatacagttccttgtgcccttgaattactgtgtccatgacagtgaagtcttcgaaagcaaagtggtcctggttcaagctggacatgcgctcattgggatcaattgaaattgaacctgttgttggttccagtttcccctctaacaatttaagaaaagttgacttaccggcaccattggcaccaattacgccgtagcagttgcctggagtaaattttaagttaacgtcttcatagagtgtgcggccaccaaatcgtaaactaacgtcggatactgtaatcaatctctttacctcgcttaaaatataaaattatgtttaagtatatcaaaaaagatggtcccttataatagagaatccatctttttaagcaatttattaaaactttttgaagctatctagcttttcctgggtaatatcacgaataattgcagtagctaaatcaactgaagccttaaagtccttataactactgaaacaatatggtgaatgttcatagcgcactggaataccgatgacaattgttggcgcaccattttcgtagtaaattgcagcaccatcctgaccgccaccggttctaactgaacgagtatatggaatattatttttatcagctaaatcacatgcatattgttggaacttaggatttggtaaaaatgtcgtatccatatcgcgcaacattgggccacgttttagaccagtttgagaaagccagtcaggcgtaaaagtatcatcagctggacagctttcgagtaccagacaaagatctggcttaacttttctagccgttacataggcgccacgcaagccaacttcttcttgactagaaagtgcagccactacgtcaaagttagtttcttcacccttcaaattatcaagcacatcaaccatcgcaccagcaccaaaacgatcatcaaagtctttaccgaagaataaaccggacttttcatgatattcgcatttaacatcaacaaagatagggcaacctgtatcaatcttgtagtccttgattgtctcctcacggctagaagaaccaacatcaattgacatatctgccacatcaggtacattattgcgctcagctgctgtcatgaagtgaggcggcttagttgctacaacgccagggatatattctccatcacgattgcgcactttaacgcgcaaggctggaatattatattttacccaaccaccaagtggaacaaacttaattaaaccattagggcgaacagcttgcgtaatgaagcctacagcatctgagtgcgcatcaagttgaattaccggtcgatttcccttattttctttcttggcggcataaacattgaacatcccatctacctcaatatctgccgttttttccgcataactagtaaacagcttaacgaattcttcctcaaagcccgaagtcgaattggcatctgagaattctttcaacatttggatttcttgttctttttgcataatttttcctttctataaaaaacgcttaatttaattttaccgagaaaaacagtcaaagtagactataattaaaaataattattgcaaaggaaaaataaaatatgaaaaataaattttcaatgataattcttttacccctgctttttagcctatcagcctgttccaaccgttctagtcgtcccgctacggttaagcagttctgcgacacataaggcatccaaacaggcaaatgagtttaagcctgatttaaaaaagaaatatcctggctttaagttaaccagtatccctgaacaatttcgcggtacctggtatcgtagcgatccactgagtaaatcagttcgcaaattaattatcagcaagcagacaattggtgactcagtagtttatcgacaagtggataagtccattaaactagatcataattctgagcaaaagaataaaacctattctggtggtgattccatgatcgccatcgaacaacatcaagggcagacttggatgcgcgttcgtgagtttttaacaactgtagatattatttatattactggtcaatttaaaggacatccttgtttatatcttgcatattcttccggagatatccacaacgcacttttcaaaaacaaagcactagcaattaagtataaaaactatgacttttctaaaattaaatcatgaaagatattaacaatctactacaacaaaaaagtaacttactcttaaaaattagctcgttacccttaaacctattcccttatttagtattcagcttaattattaaacaaaatactgcaatcagcgtgctgccttttgcactcttctatgcctttcggcgcacaacattgtttttatttaaaggcggcgaaaatgaagataatgttattggctggttcggtttattggcagctttattaggctatttcttagggattttcggcatctttttaccagccctttactgcattagcgcatcccttgccggaataggcgccgcatgtttccctagcgttcaaaaacaaatcgccattcaaagcgactatcatccaagcaagaatgatctttttgcttattttggggcaattttaattttactagcaatagttgtctttgttgaaccacatctgccaacaatttcatttatcgcaatgctcatttatacgctaattgctatactcggctttaaatattctccatttagagcacattcacgggaaattgtattgcagtggcaaaatgtctggttaactcttggtttgctactggctattctcttaattcgagaaggttggaactcgggaaaagacatcttctctatttttggcattatcgtttcagcagtagtcattattaactatctgatcaaattagctttaagccaaaaacatggtaaattatctcgcaaaatgcagtatcgcctgacaatcgcaggcctctgccaagactttaccactatcttttcagccgtttatatttctgttttatttggtgcaaaaaattactactggttatttgtcattatcttaatcgccagctttatcaaacgtccattattaaaaacgctacgtgaatatttaccatttgatgacttcaccattcaaagttggggcattgttctcggtctagttattacgctctttaggccaacatactttgcagggatttttttgattcgaattttctacagtttacaaaatactgacaccttagatcttatccgtgatcatgtcgatacaaatatttatatgatcaactatcgttttcgcactgctggaggcttcttaactcaattaattctgtggggtggcttgcttttattcaatggaccgcacatctttgagcaaatctttaactaccatattaataaaagcgttatgaattctagtcagcccttatttttaactcaattaatcttggtgctattcataatcagctttacaatttatactttaaaacttaacaaagggaataaaaatgaatgaaaaacctatttggaaaaagaatttacttgtcttatctattgcggtctttatcgctggtatcgccttctctgaagtaatgccgtttctgccattatatattgatacactaggcaattttacccataagcagttaaacttttggtctggctttatctactccggtacttattttgtatcggcgataatttttccctggtggggaaaactagcagacaaaaaaggcagaaagccgatgacattacgagcttcattgggaatggctatcgtccttggctgtatggggctagttaccaacgtttatcaattatttattttaagaatgttacaaggtatttttgcaggctttgtttctaattccaatgctctagttgcgactgaaactccgaaggaaaaatctggacaagcacttggcactatggcgtctagctttactgctggcaacttactcgggccatttattggtggagccttagcgtctattttctcctatcgcgttaccttctttattacaggtggtctattattaattgcatttcttttgtcattgttctttgtccatgaaacagacttcaagccagtaactgaaaagaaacttgataaagcaagcggagtaattaaagaattacgctcaccgcaattaatctttggcttgcttttaactactctaattattcaagctgcaaataattcgattaacccgatcgtttcactctatgttaaacaattgatggctaaccacggtaatgtcgtctttatttccggggtaatagctgctttgccaggaattgctacattccttgcggcatcgcgcttcggtgcactcggtgaccgcattggaactcataaaattattattgctggctttattggagccacaatcctcttctttttgactgcttttgtacaaaatactgttgaacttggtattttacgctttttagtcggctttactgatgcttgcttgttccctcaagtgcagactttgcttactaaaaatacgccagcaaaaatcacggggcgaattttttcttggaatcagtcagctatgtatatcggtaatatttttggaccgctactaggttcaactatctcaggattaactaattacagcactgtctttatcgttactgctgggattgttgtctttaatttgattttgtttagatttaatgtgattaaaaatttgcagtaaaaaaagtgtttgagtttttctcaaacacttttttctattccgcagctttctttgcttcatgatgattataaataaagtttgcaacatacccacaaataattagcaacaacgatacaatcataatttctctaattccggtatgaaaaattgtccgcattgttggcattaacgccttaggcaaactcttcgcagattctgcgtcactcaacttattcatcatggtcatcgtaatattgtggtgtccagcaattccacgtgctagagctaaattcataatcaccccataaacggcagccataatagtttgcgctaaaattctaatcaaaaaactaagcgatgtagcaggtgccatatccttttcaccagcgtcaatctgcacttttatttgaagaataacgaagattgagcctacacctaaaccagataacgctgcaatcgacatcaaaatctgatatggcgtactaatcggtacaataattaaaccgattactgttattgcaatcaatgtaaaatcgaaaattaacaaatgataattattaaaatgtctgagtaaatgcggcgtactttgtgaaccagcaatatcaaagattgagttaggaatcaacgtcatcccaccgattaaggccgttgtccctaagattgcctgcgaccacattggcaaataagtgttaactgcaatatatgcaccccaggcaaaggcaaaaagaatgaaatcaccaactaaagctttattagtaaaaaccgataatggcacgataggactagcagcttttttctcaactaagatgaaccagacaagcattacgatcccgataatcacgaaaatagccactagaaaattactagctagtcctaacatctgaattccaatcaaaaagcaagtcaaaccgccaattagggtaaaagcacctagtcggtcaaagacagtattgatgtttggcttgcgaatgccacgataaaaaagaaaactcaagataattgatatcaatcctaatggaacattgatataaaagacccagtgccaggacaaagcatcaacaatccagccaccaactagtggaccagcaatacaagcggccgaaaaactagctgcaatataactcaagatgaccgtcctgcgtttgatattcggataaatatagccaacaatcacataaggaagagaacccattccaccagcaccaacgcccatcagcactcgagaaataaggaaaaagtaaatatcaggagcaaccccttctaaaactgaacctaaaataaataaggctagtgacaattcgaaggcaaatttgttacccattctttcaccaattttactccaaattggcactgagaccgacattcccagtaaaaaacaggcaacaatccaacccatatactgaattccgtgtagatcggacacaattgctggaatcgccgtattaataattgtcgcatctagccctgacataatattagccagcaacaaagacaaagtaaccattgatatttgcttcttagtcatttaatcccacctttttaactctaaaaactactattactcatagtatgcaagatttaactagcaaaataaagcacaatatttttccactaaatcttgacaatctgtgtttttccgagttaaatataaagaaaataatagtgatgacctttaaagttagtcccgtgaggctaagaaggaaatctgcacaagctaatactttttgtcgttagctaatacagaaggaccatcttgagccatgagctcttggtggtctttttcttttggtcatccagaaaggaaaaactatggcaaaagaaataatcgatgctttaagcatgaaacgcgccttgatgcgaatgacctacgaaattgtcgaacgcaataaaggtactaaagatcttgtattagtcggaattaaaactcgcggctggtacttggccgagcgaatcgccaaaaatttgaaaaacttggaagatgttgaagtccctgtaggggcaattgacatttctcaataccgcgatgatttaccagaggctgagaaggaaaagatgatccacagccaacaacttgacttcgatatcaccgataaaaacgttatcttagttgacgacgttcttttcacaggtcggacaattagagctgcacttgatgcattaatggatcaaggccgtccagctaagattaatttagctgtcctagttgaccgcggtcatcgtgaattgccagttcgtcctgactttattggaaagaatatcccaacggcaatgaacgagaaggtcaaagttgcaatgactgaagtcgatgataaagatagtatcgaaatcgttaaataggagttttttgaatgaataaaaaagaaaagtacagaaatccggaggccgttttagacgtctatgaaaagccggaattcggccaaggcgtactgctatccttacagcatatgtttgctatgtttggttctaccgttttagtgccaattttaattggaattaacccaagcatcgctctactttcatcaggaatcggtaccttggtccacatgctcttgacccacttcaagattccagcatacctcggatcaagttttgccttcgttgctacaatgcaagccttaatgaaggctgatggctacccggcagttgcccagggtgcgatcgcttctggtttagtttacgtagttgttgcgatcatcattagcaaaattggttcaggctgggttaacaaagttttaccaccaatcgtagttggaccaatcatcatcgttattggtttgtcactagcaactactgccgctaatgacgctatgatgaataattctaagtatgatttgacttacttcggtgtagctatcttcactttggtcatgactttagttttccaaatgtgcttcaaaggcttcaccagtttggtttcaattatgctaggaattatctgtggctatatcttatcctgctgcctcggaattgttgatttctctggcgtggaaaaagcagcttggttcacattgccagcacttgatgtgcctggaatcagctaccatttcaaatggtaccctgccgctattttagccatggcaccaatcgccttcgttacaatgacggagcacatgggccatattatggtattgaattcattaactaaacgtgactttttcaagaatcctggcttacacagaacgatgatgggtgatggtctttcaacgattatcgctggtttcattggtggtcctcctaccacttcatacggtgaaaatatcggtgtgttagctatgactaaagtttactcagtttgggtattagccggtgctgctgtttcagcaattatcttcagctttgtcggtaaacttgctgcattgatcgaatcaattccaatgccagttatcggtgggatttccttcttacttttcggaacaattgcatctaatggtttaaagatcttagttgatgatcaaattgattttggtgaaaagcgcaatatgttgattgcttctgtcatcttggttatcgggattggtggagcttacttacaactgggcaatttccaacttacctcagttgccctttccaccatcatcggaatgcttttaaactggattttgcctaagaaagcagctagtgaaaaagctcaagaagaaaagattaagcaagaaaaacaagaaggtaaaatttaccaatagatagaataagccattcaaaaacccgttagttatcgcaatgatagctagcgggtttatttttcactctcactttgcgcacgcaatgttgtaagttgcgcgaaagttggcgaaagttagtgtaagttacgagagcaatagtatataatttatttacacaaataaatttaagtcatgaggtgacattaaatggactttttaaacttcaaagcaattacacaaactggtaattttaaaacaccatctgaaaatgaaaacatcgaatacaaagaagctagttggaaattacctaaatcattttgggaaactgttagctcttttgctaatactttaggtggaataatagtattaggcatagcagaagataagagtaaacatgaatttagtataactggtgtagacaatgttgaagacattgaaacacaaattttcaatgataataacaatatttcatgccttaatcgacctgtaattcaaaataatgatgttcagatctctgtttttcaaaataaaactattattcaagtaataattcatccagaaccctttaatacccgtccaataactgctttcggtaaagcatatatcagaaccggtgacggagatcgagtaactactaaagagcaacttaaatattttacagttgaaagtcaaaacgaaatcgatactcacttactcccttcgacctatacaatagaagatttagacgcagagaatatcaaagaatatcgcaaaataattgataaaaaaggtattattagcactaattctcaacttagtgatcaagaattcttatattcaattggtgttttcagaaaagatcgattaagtaattcaaatgaatatcatcttacagatggtggtctccttttctttggaaaatatatttcgataacagatcgtttcccacgttttcaattagactatcaacaatataatagcgataattctaccaactggaatgatagagtttctgcaggtgatatgaattaccctactttaaatatcttttctttttacaatttagttttaactaaaatagaagcaaatgttcctgatccttttattcaaggtagtgaccttagtagaacgtcctatcacaacgatctaatcatcgcagctaaggaagccctagtcaattgtttaatgcattcatattatgatggtatggtaggtgtaaaaattgtagatagacctagttactttgaatttacaaaccctggtactatgcgcgtaagtaaagaatcatttttacgtggacaatattcctccattagaaatactgaaatcgctagtttatttagacgaattggtgtctctgaaaccgcagctagtggcggccctagaattcttaatactgtattgcaaaataatttaaatgatcctgaaattaacattgattatgaaatcaatactactcgcattcgtatttttaagacttttgcaattgataatcaggaaaaattaactgaaccagagaaatttattatgtcttttgctagcagaaatcctaatttttcaataaatgatattgttaaagatccgcagaatcattttggtaaacaaaccacgattagaaaatatgtaaattcattagtagagaagcatttactatccaatgagaaaattggcaaaaaatatatctacaatttacagaaaaacaatgattatctaaatcgcgttaaacaccttaaacatcttgaagataatttactcaaatagatcattcaaaaagctcaacctacaaaattatgtagattgagctttttcatcttatttatcttcaaatattctaggcttatcgtcatcaagtgaaacatgcggaatttcggtgttatttgtctcaacttgatcgttctcagacaattctgccttcattaactcacttttggctttactagaagtattgcctaaaagtaaagttttctcctgcggcgtattcaccattgcctgtttttctttgaattttttataaacaaccgccgctactgcaccaatagctccagcaacaccgataattgtgccgattaatctcatctttttcatagggatcacctcgtattttgaaatcactttcttatccttaattatatctaattatgaggttgaacacatttttaatgcctattacctaaaactttccgcaatttctggatccatctcatcttctaaaacgctatacccttgatccaaagtcttgatcagagccatatcgtcatcatctagttcaaaatcaaacacatcaaagttttccgctaatctctccctatgaactgacttaggaattaccacataatttctttgtaaaaaccatctcaacattacctgagcagtagtcttatgatgcttttctgcaatcttttgcaagacaggattagtgaaaatgtggttggctccttccgcaaatggtgcccaggcttcaggttgcacgccctctttttccatatattgctgtgatttccattcttgattccagacattagtctcaatctggttcacagccggctttacatcattaaaagtaatcaaatcagctaagcgttcattccaaaaactacttacaccaattgccctaatgcgtccttccttgtatagccgctctagagcccgccaagtaccatagtagtcgttatatggcttgtgaatcagatacaaatcaatataatctaacttcagctttttcattgaatcgtcaaaggcttgcaaagtctgatcatagccatacttatcgacccagattttagaagtgacgaaaatatcctctcgtgggatgctgctatgcacaagtgcatctccaaccgcctgttcatttccataaatttgggcagtatccacaagtcgatagccaacttctaagccgttttccacaacttgttgagtttgagctaaatcatcaatttgataaacaccaaaacccaagcgaggcattttgacaccattatttaaaattacatagtctttcatatttcttctcgttttctagttagttcttgctattcaattttattttaacatagcccatgaaatccgactttattttgtgaaacatagatattatttcttaaaattaagtactcaagaaaagcctaaccagcatccctcaacggaattgccagttaggcttcttttatttttcaacttttgcttgataaaatccaaagctcatctgcttcaacattctagtaaaactatcaatgtctagctttttaccggtagtcaaagcttcaaattcaccatcaggatcaaccaatttgcggtcagtcctgtgaaatccatttctttcatagaatttcaggcgactaacacgctgcttataatttttcgccttcttggtaactggctcaatatcaatgacaatttgcttatcagggaatcgatcctctaacatcatcaagatcttggaaccataaccttgtcctcgcaatttttcattaatggctaaataggtcaaatagactgtattatcattctcagcataataagtaatgccgcaaaactgaccatcattataaattgcgtgaaacttaacatttcggtgtaatgacattgctaaaagagaaaacatggagaatctttcccaagctggaaaagccttcatatataacttcttagcgtcacgatatgcttttgtgccccatcgggcgggtttagagtctaaaatagtatccttcttttctaattaaaaattgattgttaataactctgaataatattattatacaaaaaaatttgatagtttcttaaaattattttatatccgttcaagctaatctaattcaaattagtttaatttctacctcaactttaacctgtaattcaaattaattttaatctcttaagacttttgagataagttttaagttaacttgaatttgctgaaaattttactgctagatttaaataaaaagaaagcttgtcatctaaccaatgtcattaagttaagacattgacaaattatcgacttggacttttaagatcattcatttgtgatttatcgcatttgaatgatcttttttcatgccaaataaacccaaattttgtttagaaattaggctacacgatataaataatatacagctgatttgggtttgagatttcttttgtcttttcgtcctggtctgatcggaattgtgtaatgactaatttgaataagaatctttttaaagatttcagttgaagaagaaattatatacatagcctggatgacaaaacatgactgtttgaaattgatcgcatattgatacttgcagtttttttgtggtacatatgcttgagcatcaatttgactgactgcgttaaacataatcatgtgggcatagatctccatttcaataaatctatcctgcttggaatgaaactgtacgctacctaaagcatatttcaactttttgaatgaagtttcaatgccccagcgcaaatggtagatctctttgatcctttttaagggataatcggctctatttagattagttagaacaacttcccattcttctttgcctgatttaggatcattaattctaaatttacaggcacgaaattttattgtacataactctccaaagtcccagctgccatctttggtatttttagaccgatattttatatattgacggtaatgatggttaaccaaatgaacgttttctgtagccttatgggtttcataataataattagaggtagtcacccagcaagctatatccttatcacactcttgattaggcaactcagctacttccttaaatgcgccatatcccgttttagtacgtatgacataataacagttaggcaggcgattacaattttcaatcatgttaaagccggtataacctcgatccatagtaactatatatggtccgcaatttagctttttaagcatttgaatggcggctttacgttcatccatctttgacttaggctgaaagatgcagtcttgataagtattatttaacaggtcatagagtgcattaacatgaatttggcaatatggctttcctttatgattgagatttccaacgatattctctgatttaggattccagatttgattaaaatcagacccatcaatggcaaatatacgatatttatgatcaaataactggatattaaataaattctgattaaatacagttagaatatgcttaaaacatgcgggtgaaagctgacctttgcgttggacataagcggaagtactgactactttatcgttatttttaatagctttttggccaaaagctctaaacaactcactggtcaaatcttttccttgcatattaatagtagttttaatgactgtagctgcatctaaaaaccgcttcctagtgaaggcatgaggatcatcgataaaatcatgaatatgctttccagtatcattgataatttgatcaagacgatctaaaatatttctgtgaagggctttcataattaacaccagctttctggcaataattttgaaggtttaataatttaatcagagggcgaaaaggtaggttcttttcgcctttattttatgcaaaaaaagaaccaaatcataatgattcggttctacagagattagattcaatttgtcaatgtcttaacttaatgacattggtcatctaacaaactttcttttttcatataataatcgttaactacatcaacttatatttcttcatcaattcttcaatatatgtgcctagaagttttatactgaaatcttgttctctctcaactttgatataaatttggcttccgcgccaaatttaaggatatgcaaagaaagacgcaattatcacatttttaattaaatatgagttaattgataatgagctgcaatttgagaaactttgcatttatcaactatttctgattcactcatgttttttattctttcatatggcatcaataattcaccggcaaaacattctgcttgccattctggatttttatatattggaatttctccatttcttctatatagagtcagtgaagaaggttgatgtaatataaggtgtagcaactcatgtgctattgtcattctatcacgtccaacatttctaatcgctcccatgtacaccgattctttaataagaattttatccttaacgatatcagtttgtgcctgaacatcatattctaattcatcattgtctacaatttcaaatgaaaaattaggatctaattctgatattttttctagtacacgcgtaatatcaatataaagttgacaaggatttatccctaataataatcgtacatctctagctaatgctcttaaatctttacgagattctggtttaacttcaaatattgaatcataactaattatgtctctcaccttctttcaaaatcttctgaatttgagctatttgtttatctgtcaaatcatcaaattttcttgcaaacatcaatgtagcttcctgcttttcaggtgaaaatttagatatatccaagctttcttcacttatgctcaatgcatcttttagctcttgttcttgctctctatccaagttatatctatcaacaatattattaattaatgatgcggaagccttcttatggccattttcaacaccagataaaaaagccgagcttaccccgacgttttccgccatatcataaagtcgttcatctcgatctaccctaagttttctcaaaaattttcccagtgctgtataagtcatagtttactttctcttttctaatatttactttctaaaatctttattataaataatctcattcactgaaagaagatcatatcttttaacatttaaataaattatactattactttcttttgtatcataagctggcaaataaaacagatcaccaacggagttaaaaacctttctaaattttacaccacctactttctcttgacctataactttaaattttgtcccagaaacagaatcactcaagtcgcccaaaatactaattctacaactatacctgttgcctgtttttaaaaaattgaacttatcatctcctaaaatatctgaatcatcaaacacagtataactttgattcgttttttgactctcaagaacaagatctcgagtaacttcataattaatgatttttgttaattcatacatagtattttatgcctttccaatcggataaaaactgacgatataaccattatctccatatgctattaaatatatcattccattgtgattatatataaaaacatctgctagctgtttaccttcttttctacttatatgtttaattggctttaattgaagaattttctttgcaagcaaaggaatattagtgtttgaaccaaaatcttttccatgccgagtttttatatgcaataacccactttttaagtttcctttctccagccacattaatttaccagcatagtttttcgtaatcatcactatatctgatttattatacttagcattactgttttctaattcatgcatcaaatctttaggctttagtcgttcttttgcaccattagtattaatataccctttataaccacttcccatcagcaagcctccttagcaaaaatttcttgccatgagggatatcttataaatttaatgtttcttttatatggtccaaaaatatcatcgggcatcgtaccataaaccaaaacttttttgggtctaactttttctagagcaatttctaatccagcttcaaataatattcttttttctttatcagcaatttgcccatatgtacccactgaacaaacttgatgcttaggaattccctgaaaaacaaaatcatatgatcttttatcaccccaacgtaaatttggaataatatttaaaccataattttgtaactctagagcaactctatttttctcatatacagcaaatttttgtaacactaatggttcgtcagcataaatgctataatcaggctggactacagatcctgcttttaacaatgatggaacaagtttagcaattctttcatcctttaatttagattcaaaacttttatcccattcatagaaacaaatagcatcatttaatgacgctatttttctgtcagaaaaacgaatcatttgaaaagggatcactaaatcttctttttgcttattcagtactgggtattcatcttccccagtaaaattagcattaagtaagttggacaatattatctcctcacattctactaaaaatcgaagagaaacatggtacactaaatatggttacagaagtatacttgcttctcttgcagcgattgtttcagcaatcgctgtattttatttctgttttcagttaatattattaacttatttagttaatttgtcaaatataaaaagaaagtcttgaactgagacctaaaagttagacacttttaggtctttttctacgtaaagtcaagcataataagaagtttggcttcattttttgtttaaatttcaacttaaacatcttttagtgtcgatttatttttttagttagacacgacaaataagcccagatccatatctgatttttgggcttagcgttataatgtacttgatcaattaattacgactaaagtctttttgattatgtgtggctacgttgtaatcatatggttgatcattgataatcagggcataaatggttctgattagtttatgaattgaagcaatagctatctttttgaaccctttggtttgagaggatagctttttgctttcataataatctgctatatgacacggatttgtcttagctgcattatcaatttgtccaatagctcgataaagcaacttacgtgcgactgcattgccatgtttagtaatacttaaattagagtccatttctcctgactgatatctgcctggatcaattccgataaaagcattgattttattaggattactaaatctgcgtaaatctcctaactctgctaaaactctgacagcagtggtctgtgcaaagcctggaatgctttctaggttttctaaatcatgattaggcaaagacttcgctaacttaaccattcttgcgattaaattttctctttgatcacttaaattaagcaatctgtgtgcataatactgcacttgctcgacttctatgctagagcaagatacaactggataagcttgataagctaattcaattaatttatctgcagtccttagagcgtgtttaaaagcaatcccctttaagctcattaaccagttaataagctgttttttatcttctcttcttactaagtcacaatgaggatatcgcacaactatttgccagtaatttttacctctagcagaagaaaataaattttcaatttcaggaaaagtcgattgtagagcttggtgaagtcgatttttagctattaccaagtcacttgtcagctggtcatagaagcggctcaaagcattaagctgcttataagtttgggattcgctttgattaaccggatggcgataaagtctttgaattaaagctaaatgataagcatcagttttatcggtcttgttgtagcgtagccccatattcatctcttttttggctttaagcggattaataacaacatattcatagccgtagtcttcaagaaaagcctgcagtctgcgtgaataaacaccggtagcttcaaaaataatttgcggatgtttagaaaaagcggttaattcatgaagcaattgaataaaaccaggacgattattagtaatggttagttcatttttgctttcaccaattagttcacaaacagtagaagtagacttgcttacatcaattccaaaagtaacttgcataataaaaacctccaaaacttagtagtaaaacgtatttacttaagaaatcagatctaattttctaaactcgacatctagtgtccacattcttcgaagagactattgaaaacttaagtaaaactgccagtttattatgcgacatcaagtgtctaaagacctcagggcatatcgttttaccactactttaattctacaaaagaataaaaatagtgaatcaattatcccgtcggataactaattcactatttagcttagaatgtttactatgtctaaatttaataaagaacaaaaaatagaaatttatcataaatggaaagatgaaaatatctcaatcagtcaattggctaaagcgtacagaatgaatctagctaatttagactatatgcttagattaattgatatgcatggaatagaaattttaactactaaaaaccaaagctattccaaagagtttaagcagcgaactattgaacaagcaatctttggcaataaaccatacttacagctgtctttggaactggggtttaaaagtattggcatgcttaacaattggattagagaatataagaaaaacgggtataatgtcattatcaaacagaaaggacgccctgcccgtgaccaaagaaaagcagaaatctcgcaaggaactggagaaagagatccagcagctgaaagaagaaaacttgcgattgcgtattgtgaacgaatacgtaaaaaaactaagtgccttggaccaagaagatcagaagaaatagctagggtgattacggatctaaggcaagaattcaaagttagtttaaattatgtattagctgcgattgcagagcaccctgagctacctataattgccagaagctcatactacaagattatcaaacgacagcccgtcaagcctaaacggtcaaagcttattgctagaatccatgagatttttaatcatcatcaaggccgctatggatatcgcagagtagctttgcagttaatcagagagggctggaaagttacggagaaaaccgttcgctattggatgcataaattaggtcttaaaggcatcaggcgcaataagcgcaaatattcaagctataaaggtactattggcaaaatagctccaaatttaattcatcgtgatttcttcgcagccctgcctaacacaaaatggtatactgatatcactgaatttcatcttaataatgaaaagctttatttatcgcctattctagacggctgcggtggcgatatagtttcttatactatctccaaacatccagatatggatttagtaatgacaatgcttgacaaggcttttgccaaagaaacagctcttaataactgcatttttcatactgatcagggctgtcagtatcaaagccctcgttatcagcgagctttaaaactccatggtattactcaaagcatgtccagaaagggcaactccatggatgatgggctaatggagaacttctttggcctgctcaaaactgaaatgttctatgatcaagaatacaagtatcataatcttcaagaattaactcaagcaatcgaggaatatatcgaatactataacaacgaaaggataaagagcagattaaaaggcttaaccccgaaagagtatcgaagtcaagcctctattaatccaatattttaattgtctactttttacgtctcagtacatctgtcaatctaacaaactttcttttttcataaataatcgttaactacatcaacttatatttcttcatcaattcttcgatataagtgcccttaaccttcttaagcatccctttaattgcaaacttttcaggcattggcaaatcaagatcagccaacttcttctggtcattcaggtaatacatcgcattcatcaacattctgacatcaaatgcggaagcgaagacttctggtacaccgcggtcaatattaagcaaagtgtagacagcttccattgccgtccgaactgaatactctgtcgtaaagacagtgtctcttggagtttcggcaaagttaccaataaaggctaagttcttagaatgatctggaacaaccttggggcggtcgcctaaagctcttggcataaagtaagaagtaatatatggcatgtgaaccggaattgttgtagctgcggcagctatttcaggaattctttcttccggcacacccatgtgatagagccactcttcacacatttcaagcccattacaatcaggcatcgtcttttccacataattacctttggtatcagagaacaaaccatataaccaaacaatcaattcatttggtttttgcgccttaaagtgtggctgacggctgattgagtaacctaatagccaattagaatccttaatagtagttggtccactagttacgattgagccactgtgtggatcctttttattaacagcttcaataaatggcacaacatcatcattcttaaaggtaatagttgcagacatccgccagttagcctttggaatatccttgcaaaagacatcaggatggccaaagtcttcatcttgagctgctaagttcttccacaatcgccagcttgcacccaattcatgttctgctggagcgggatgcagttgatctccataggtagtactatcagtaattgaaccattagtaacgaagactaagtcatttggtgttaagtcaatggtcttcttttcgccatcttcggttaaaataatttgtttagcaaccttttcgccgtcagagcggttaacaaagatattatcaaccaccgtattatagtggaagattacaccacgatcctttaaatacttgaccagcggcaaaatcaatgattcatattggttatacttggtaaaacgcaatgatgaaagattcttcaaggttgctacatgctgtacaaagcgcatcaagtagcggcgcatctccatcgcacttgcccatggttcaaaagcaaacattgttgaccaatataaccaaaagttagattcaaagaattccttagtgaagacttcattaatcttcttattttgcaagtctttttcgggagttaaacaaagatcaacaatttccttcactgcctttggcgttaataaaagttgcccatcagtcggcaaagcttgaccacgatttacaattactctagttttagcataacttggatcttttctatttaaacgatagaaggaatccaaaatagattcaccttcatggtcaggcgaagggattgatctaaataaatcccacaaacattcaaagtgcggctccatttcacgaccgccacgaatgatgtaactttccttttctttattatagatcccatccattgagccaccaggcagacctaattcttcaaaaatgtgaattttctcgcccttcatttgaccatcacgaattaaaaagacagcagtagctaatgcagccaagccactaccaacaatataagcagatttttgatcaacatctttaggtttatcagccttaacaaaggcttcataattgccattactataatgcataattgacacttctttcaataatcgttacacttgtaactatttacgcttataatataatgtaagcgatatcagttgtcgaacattttacatttggggatgatcttgatgaatatgaagagtctgcatacgcagcaacaaattgaacatgcattattcaaattactacaaaaaaagccttatacggagatctctattgcagaaatcacccgtaaggctaaggtatctcgtacttccttttatcgcaattatgaccaaaaagatgaagtcattgcgcaatttttatttaatcaataccataattttatcgctgatattgatcaacataatttgagaacttttaagcagcagcttactgcctaccttgaattcttcaaagataatcctcaactaatgaaattactgcttgatgcaggatttgaaagagaattacttaattttcaaactaaatatttgaaaaagctgatgtcagtttaccattctgatgtccacctgcccgactatgcaatagcctatcaatctggtggaatctatatgctgttagtctggtgggttaagcaaaattatcagaccagcttgactgatttaatcacttatgccgaaaaacacattatgctgtaactaaaaaagaagagctcacaaatcgagctttcattttcaaaattattgcaatttcttgcattttttaccaaagttaaagtagaaattcattacaaaggcgataattaacaaaatcaatgaaaccaacataatttccttaataccgccgtggaaaatagttctcattgttggcactaagttttgcggcaaactcttggcacttcgcgcatcactcaatttattcatcatggtcatcgtgattcccttgtgcgtttgaactccgctggccaagttcagattcataattacgccataaacagcagccattactgtttgagctaaaattctgatcaaatatgaagttgaagtggccgttgccatattctttagtcctgcatcaagttgtacctttaattgcaaagcaacaaagataaagccaaccccaatgccagaaaatgcaccaataaaggtcaacatctgcacaggcgtatgtatgccagaaataaacaaaccagctgatgagataatcatggcaactattccaatcaaaactaatttaaaggttgtcatatgctcctgaatcgccgctacactttgagatgcgataatttcaacaatcgaatttggaattaacgtcatcccaccaattaaagctgacaagcctagtaatgcctgagcccacattggcatataggtgtttactgctaaaaaggcaccccaagtaaaggcaaataataaaaagtcgccatctaaatctttatttttaaataaagaaattggaataattggattgtctgcatgaccttcgcgaataaagaaaaagacgatgaagactaaactaattataatcaatccaattatgatccagttagcggttaaaccaactagttgcacgcccatcaagaataaaagcagtccgattactaataaagtagcaccagggatatcgaaaaccggtgtcttttttggagtaaccggtttgtagtaaattaaacaaatcaaaaatgcgattaagccaattggaatattgatatagaagacccagtgccaagagaaagcatcaattaaccaaccaccaacaagtggccctaagatcgcagccccattccagctggcagttaaatagcctaatactttggttctagttttaatatttttaaacacataaccagcaatgatataaggtaaagaacccataccacctgcaccgattcccatgataaagcgagagcacagaaagaaaataatatttggcgctatcccttgtagagccgatcccaaaacaaagagtagcagtgaaagctcaaaggctcgtttgttagtgattttctctccgatcttggtccaaatcggaatcgaaatcgacattcctaataagaaaattgccacaatccaacccatgaattgaattccgtgcaaggccgcgacgatggctggaatagcggtattaataatagttccgtctagccccgacatcacgttgccaagcatcaaggctgccgtcaccattgtaatctgttttttattcatgcttaacttctttctatggtatgtaaaaagcgttagacaaaaatttctaacgcttttgagtaaaaaaatatggaggatacagggctcgaacctgtgacctcctgcttgtaaggcagatgctctcccagctgagctaatcctccattatggggcggaatgtgggaatcgaacccacgcatgctggatccacaaaccagtgtgttaaccccttcaccaattccgccatcaacggtccatatgggatttgaacccatgatctcctccgtgacagggaggcgagataaaccactgctccaatggaccaaactagaggaggatgtgggatttgaacccacgcgcggcataaccgcctaacggttttcaaaaccgtccccttaagccacttgggtaatcctccatagccgaacagatactagtataccaaagtgagaagataacgcaagaccttttttaaaaaaaagcaaaaaaataaagcctttcggcttcattaactatgtaaatttttctggaacagcaaatacttatattctttgccagcaatttcaataaaacgttgagtagcaatattacgccagccaaagtgcttaaagaattcttgtgcatctttatcttcagccagacaccacaagtaaatcttgccatagcccatcttcttcagttcattttctgcggcatttagcaaggtcttacctacattgtagccttgaaaatcaggtttaacatataatgccatcaactcaccgcagccaagcattctagtgtcacgtggacgaccatagctaacggctgcttgaacctcgttattatcgtctttaaaaactaaattatgacgaccactctcattgagtcgttttacccaagcagtagccggaatattatccaaaaatacatctggtagcacgcctttatacgtctcttgccaagttgtttggaaaagcttacttgtttgttttgcttcgtcttcactaattaatggtttaataatcatatttacttcttctttgtcaaaacagtcacagcctctacatgtggcgtttgtgggaacatatcaacaggatcgattcgcttaaattcataaccttgttcttggaacaaaagcaagtcgcgaatcattgttgcaggattgcacgaaatataaacgaccttcttaggtccagtcttaactgtcgcattaataaattcaggtgtcaacccttttctaggtggatcaacaaaaaccacatcggtcttcataccctttttagcccaacgcggcattatttcttcagccttgcctaagtaatactttgcgttttcaataccatttagctcggcattgtccttggcatccttgatcgcatcccggacaacttcgattccacgcacggccttcacatgcttagctacactcaaaccaatcgttccaattcccgaatatgcatcaattactacatcatccgaacctaaatctgcttgcttaatcgctaaatcatacaagcgcggtgtttgcagcgaattaatctggaagaaactttgaggtgaaattctaaactttaaatcaccaatttgatcagtaatctggtcattaccgaaaactaggtaatcctttttacccaaaatcacattggtcttcttaggattatagttcaagactaaacctgaaaccttaggaatctggctaatctcagctgcaacacccatcatttgtgggaaatccttaacccggctgaccaaaataaccattatctcgccattagccttactacgacgcacatcaagatagcgtataattcccgtattgtttacctcgtcataaggcgcaatcttgtacttgcgcaacacatcacgcactgcaaccaatacacgatcaatttccggatcagtggtaaagaaatttgtcaaaggcactaaatcatgtgaatgtcgtctaaaaaagccaatctcaagttgtccattatattctcgcacaggaacttgggccttgttgcgataccctgtttgctcaggactaggcaaagtttgtcctacttcaatctcatctaaatgtgccttcttaagtaagttaacaacttgattacgcttgaattcaagttgcttatcatacttgatatgagctaaagaagcgagtcccgtttgaacccattgattcaacttgatcttaactcgatcaggactttctttttttatttcttcaattttagcaaaagcaaagttcttcttaacctttaaaatctttgcactaaccacttcacctggaagtgcattagtaacaaatacggtcattccctcgtaatgggccacacccattgcttcatacgaaagatcggtaatttctaaatctataatttgattctttttcatactcactcaaccttaaaaaaatagctctctattattataatacttgaccaatctttgtgcttcaaaaaataatcgactgctttttagaaccaactatcacccatatacgcatgcaaaatgtggttagccgctactttcaacctcaaataattaatattattagaaaatagcataatcatacgcttggtcttgtaattcgcaacaaagcagcaattataaccagggatactgccattagcgcgaatgatgtcaccattaaaatacactccaccaaaataagctaccgtctgatgctgggcttggtggtaatactcgtttaccattttaggatttttcagcacatcgttatatacaaacttccaataatcaattggtgacatgaataagttccctgctccaaagtccgacgacgtcgtcactgtcacttggtgccagtcaacatttttactcattggctgagggatctcgttttggttaacctcagaaaaatccttaactttctggagcttaagtggcttagcaaaatcggtctgaatataagcattataacttaaattagtctgcttgctaataatagctgctagcaattcataatcaacatcttggtaatcccaagtatgaagatgatcattctccatgtgattaagcatataagctatttgctctttctgatttttaagcggagaagatggtcgagcattgttaaccaagccactagtatgattcatcagcccatgaattgtaatatctttactacctgaaacttgaggataatagttagataaagaggtattccaacctaataacttttcttgttgcagctgataaattgcagttcctgtcataattttttgtagcgaagcaatcggaaacaattgattagcgttaactatttggcttgaatcagtggtctccttattttggacaacaatcggttgcccctttttatcattaattaacattacaccgttgatatgatgaaacttcatataatcatgcagctgttctttctgattcttaatgccattatccagcttatcccctggctgcacaatgaataaaaatattgcaaaggcacaaagtgccaaaaagatggataaagctcgttttttatgcataaagattcctcttaattactatcccaagcaatgtaataactatatttcttcaattgtaaatctagtatctaggaagactcaactatttggttaatttttgcatctaaaaatattttacttaaatctattgacatacttttttaatcttgctatcatattgctcaacaagaaacgaaaagtagcaactttgctcagcgttcagagaactggtggtagctgcaaaccagacaggcaaagtttgacgaaatacgtcgttataatgttgttcggaaaaattcagaaccgttaccatctgatagagattcaagttcttatgcttgaaagagtgggtggtaccacggctattgtcgtcccgttgacttaggtcaacgggattttttatttggaggaataaacaatgaaaaaagaaaaaatttcctttacagaatcaatcattatcctgatagctctattagctatcctcggcattgctgtaatcaaatttagtctctcaccagaagtgcctgttttatttacagtccttctacttactttctgggctagattacgtggcttctcctggcaggatgtccaagatgggatcaaagaggggatcggcgttgcaattattccaatttttatttttattttaattggtgctttaatcggaatctggattaaagcaggaattatcccttccattatggtcttaggttttcacttaattagtggcagcttctttgttccatctgttttcatcgtttgttctatcattgggatggcaatcggtagcggttttacgaccatctcgactgtcggaattgcgctttttggcatcggtactagtatgaatattaacccagcattggttgccggtgcaattatttctggtgcggtattcggcgataaaatgtctccgctatccgattcaactaacctttcttcagctgttgctgaaagtgaattatttgctcacattaagaacgtgatgtggtcaacaattcctgcatttattgtttcattaattttattctggattttaggcaacagtggtcacatggacctaaccaagatcgaacacacttctcgtattctccaagctaactttagcatcacgtggtgggctcttatcccgattattttaatgattttctgtgcatggcgcaagatcccggcaattcccaccttatttatgaacattgctgtcaccgttataatgatttttattcaaagcccacacgaatcaattcaatcacttaataatttagtcatgaatggctttgttgctaaaaccagtgataaagcagttgacgctctccttacccgtggtggaatttccagcatgatggcaactgtagcattaattatttctaccctatccttagggggaatgttgatgaaatttaacgttattcaaagtgccatggagccgcttgtaaagcatctcaagaaaccaggtcggttaattacagtcactattttgtcaggaatctgcatcaacctttttgttggtgaacaatacttatcagtaattttacctggacgtgcctttaaacctgcatttgataaaattaagctttcaccattggcacttagccgcgtgcttgaagatggcggtagcgtaattaactacttgattccatggggagttgccggttcatttgctgcctcaactttaggcgtacccgtcttacaattcttaccatttgtcttcttcagtctgctttcaccaatcttctctattttaagtggaattactggaatcggcttgaagtgggttaaagaaaagtagaaaataatcttgtgaaaaaagttcctaggatagttgtctttaggaacttttttacgcaatctattagaactcaggaataaataatgcaaattaatgaccacaaaagtaactggtagttagctgatattggtgattatcttaaggttatcgctaatggatgtgtcatgttacagccaattattattcttttcttgaccttaccatttggctattcgcaacaactctttttggcatcgctttataacctagtcaaatttacgtcaccagccttcagcaacatggtcattttcacaatgttgcttcatttatttggcaatttttcagtggcaatgctgcacctcatctttggtacagtgtcatgatgctgcaatttttacttattatgccttggattaaggctatctgtaactgggtcaagcattcttattgccgcctagcagttgcagttattagatcgtatcttcatcagctttctaatttttgggctctacggtggtttaagctggaactttcatcatgaaattcagacttttctatttaaatattggtagctaattgttggaatttatcttttaacttacttttggaccagagatttatttttagctacttccaaattaacagatctaaccaacgacagttattacctaccttcaatggcaatttatgctttagctgttatattcttgacttacctaatctgtattgcacaaaaagtctttaatatgaaccattggctaaaatcaattcattttctagctttttatgcttatcgagcatttttagccaatgttttttgggatcggatcttttggcaatattttaattttaaacagctagctttacaaaacatttatctagctgtcttactactctggatttgcacatggtgtgcttcatatttatctgtttatgtaattcaccaactttggcttaaaattaatgattctgtcgatccatcctaatttgcgcacgtcgatattcctgactgtcacgtgtaggttgagcaattatgtctgtaactattatttcatgatcatttcgttcaaagacgattgcctgatctaattccgcatttacttttttattgatagtggaattttgattaaatttcaaatcatcaagctcccgatcaataaatgctttttgcgagctggttagctgatgatatttatctgcagcagctttagtaaacgacagaatcattttacgattaaactcacctattttatccggatgctcacttctttgaccgcgcacatcatcatcaatatatctttttttcatcaaaaatcacttcctctatttttactatacaggagatcatttctattagatatttttctgcttggtttagttttttcataagaaaaacttactatttatcatttatgtcctaaatacggtaaaatagataggacaattaaataaaaggagtgtagtaatctatggataacttttctaatactccaggacggcgtcaagtccaagatatttctgcggttaacagtttcttaactaagatgtacagtctaatgattttagctgttttagtttctgccgcaactgctttcttgacgacaactgtatttgcttcagcaattgctaacatgtcacaagccgtttactggatcattatttttgttccaattgttttatgtatgactatcagctttaaggcagctaagaatccgacactaggtttagtccttttgttaattctttcagcagtctatggctttgaatttgcctttattgcaggtgccttcaccactgcctcaattgcgggtgcctttttatctgcagctggggtatttgcagcaatggcaatttttggtactgtaactaagcgcgatttaagtaattggggttcatatcttggtgctgctttaattggtttcttagttgcatggctagtaaatgccttctttatcagaagcggtgctgccacctttatattctcttgcattggtgtattacttttcactggcttaacagcttatgatgcacataatgctaagaaaatttatatgacttacggtggtcaagtttcagacaccggtttagctgtaatgggtgcgttaaatatgtaccttgatttcatcaacattttcatgttcttgcttcaaatttttggcatgggcggaaatcgcgattaatctataattataaaaatagcgttgattggcttacactaatcaacgctatttttatttgatgatttcttatcctttttaagaaaactagtcagttcatctagcggcgtcttatgcaaaaatgccataatattttctctcatatcataaggtgaaagacgatcactgtagtttaataaaacccgaactaaatcaatcatactattaataaatacttgaacatcaataagcattgctattctttctttaccggtcaatttaatcccttggctatcatccatactattaattctctcaaaaaactcatcacaactcgtatcaaaaatcaaattataaaaacgaatatcaccattatctgaaagtagcaattgaatttcacgtttatgatcaaaacaataagaaatagtatttttggttgctgataatactgcttttaattgatcttgtgtaggaagagtcatatcaatattagctagagattcgcgatcacgtctaatactatctttatatccttcgataaaatcattttcaacgtctgccactaagctattaacgtctgcataatattgataaaaagttctggtacttacacctgatacttcaataatgtctttgacttttaactcataaacacttttttcttctaagcatgttagcagagcttctactaagcgattcttagtattagttactctaatatccaaatagcacccaatcctttcatctcattattcaaacataacatccggtgaaaataacattttactatcgtccaaatcttttttactttttcaacctaactgtaatttcattgttttaagcaagatgcattcataaaatagtaattgaaaaatgtaattagtaggtgatataagatgtttaatcaaaataaaatcattatttttaataatagaaaaaataattgctctaagaactatactttacctatgcatgatcaaaaactgctaaagcaatttcaatcaagtctcttagatgacataacatattatccttttcatcctcttagacatataaataagacttttgttagattcatcagtacttcaggcaagcctttattcaacgattttgtctatcatttgcaaactcgtgaattaattttgaatgacttaatcttaattagttataagtacctggtcaggaataaagctaatattgcttactctgatctaagaaagaattgggtaaatgtatttaacttatccttctgtaccaacgatattaagttcaacaaggaagctttattaaacaaaataaatgaagctaacaagatgtaattattcctttaacttccacatcttattaaccaaaaagaaaaagagttcaagtttagattgcttgaactcttttcgtttcttttgcttcaatttattattgtcttttagttagcttagccaccaacataaaattcaatatgctgttgcaaattgttaaattcaactggacaataaccaccgatctcaccatcaagattaactggtaagtcttgcccttcacttttaccaatcaactcggccttcaggctacgcgttttggtataaatgatattgggatcatcaacatgtttaccattcaaagccaatgccatcaacttcatcatgctaacagggtcagaaggcttgaccacgatcaattggaataatccatcactaagctgtgcatcaggcataacttgctcaaaaccaccaattgaattagtcattcctagtaggaacattgataattttccttcataaacgccatcatcataagtcaaacgcatctcattctcagtcaagtgtggcaacatttctgcccccttgattaagtatgcggcataacccaaagctgacttaacctcagatggtacgccatatgttaactcagttaaagaaccgctggcagcaatattaacgaaatattgaattttgtcaccaaaaacagctttaccgatatccattttacgagttttattctttaagattactttagcagcatctggaatattatcacgtggaatggctaatgcacgagcataatcattagtagtcccagcaggaataattgccattttaggcctgttttctaaaaaggcaatcccgttaactacttcattgattgtaccgtccccaccagctgctacgattaaatcaaagccttccttagcagcacgagtagcttcattgcgagcactattttcttcaggtgtagttctaaaagcactagcttcgtagcctgcttgttctaatacatctaaaatatcggccacattctttggcatctgttcgtgacctgatacaggattataaattaatcttgcttttctagtcataattactacctaacgttctaaaaattaacgactttgcaattcttggttaagtaacttgttaaccatcttagggttagccttaccacgagtttgcttcatgatttgaccaactaagaagccgattgcacgatccttaccattcttaaagtcttcaacagattgagggttatcatcaacaaccttcttaaccattggagctaaaacagaagtatctgacaattgaaccataccattatcttcaacatacttcttaggatcagtaccattttcaatagtttcggcaaagaccttcttagcaatcttagatgaaatagtaccgtccttgattaacttgatcatttctgccaagtgttcaggagttaacttaatatccttcaattcaatacggtgatcattcaagtaaccattaacttgagtgttcatccagttagctgcaagagttggatctgcgccagctgcaacagcttcatcaaagaagtcagaactttccttagtttgaagcaaaacgttagcgtcatatggcttcaaaccatatttatttacatagtcatcgtaacgagcaaatggcccctttggtaattccttagcaatttcatcgatccattcttgtgaaatatgatctggtgcaatatctggttctgggaagtaacggtaatccgatgcgccttccttaacacgttccaaaacagtcttaccagttgcttcgtcaaaacgacgagttgaaagttgaatatgaccaccagctaatagaacttgttcttgacgcttttcttcgtaggcaagtgaacgacgtacgtgatcgaatgagttcaagttcttcatttcgaccttagtaccaagttccttttgacctgctggacggatggaaatgttagtatcaacacgcattgaaccttcttccatcttaacgtctgaagcaccagtaaactgaacaatcttacgtaacttttcaaggtaagcgtaagcttcttctggatcttccatatctggttcagaaacaacttcaagaagtggcacaccctgacggtttaagtcaacgtatgaataaccgttagttccgtgagtgttcttaccggcatcttcttcaatgtgcatttcgtgaataccgattctcttcttcttaccacgaacttcaacttcgatgtaaccatcacgagcaagtggttggaagaactgagtaatctggtaagccttagggttatcaggatagaagtagttcttacggtcgaagtgagtagttggcaaaatgtgagcgtgggttgcgatggcaaccataatacctaaacggtaaacgttcttgttaaccattggcaaggtaccaggcatagcccagtcaattacattagtctccgtgttttgttcagcaccatatgttactggtgaaggagagaaaatcttactctttgtctttaattcgaagtggacttcaagtccgatagtcgatttaaaattcattcaattagtcctccattccagttggtgttttttcataaaacttgttagtgcgttcgataaagtcagcagtcttgaagacattaccttcatcaaaacgcttagccataacttgtaaaccgacaggcatcccatcaactaaaccagctggaacactagctgcaggaatacctgctaagttggcagaaatagttaaaatatcattgttgtacatcttaattgggtctgaaacttcttcgccaataccaaatgctggctcagtagtagttggtccaacaattacatcattttctgcaaagatcttgtcaaagtcatcacagatcaaggttctaaccttagcagcttgtctaaagaaacggtcatatgaaccagctgaaagggcaaatgaaccaagcataattctacgcttaacttcagcaccaaagccttcagaacgtgatttaacgtaaacatcaagtaagttcttagtgtccttagcacggtagccgtaacgaataccatcgtatctttgcaagtttgaagaagcttcacttgaagcaatgatgtagtagtcaggaacaacgtatttagtatgtggcaatgaaacctcattgatcactgcaccagcatccttcaaagcatcgatttgcttttgaataacttcacgcatcttaccgtcaactgcttccatgtattccttaggaacagctacgcgaaggcccttaacatcttgaccgataaacttggtaaagtcaggtacttcacgggttgaaacagttgagtcatgctcatctgcaccagcaattacgtttaatacttcagctgaatccttaacgcgcttagtcattacaccaatttgatcaagtgaagaaccaaatgcgataagaccccaacgtgatacacgaccgtaagttggcttaataccaaaaataccgttaaatgcggctggttgacgaattgaaccaccagtatctgaaccaagtgctgctacaacttgaccactagcaactgcagctgctgaaccaccagatgaaccaccaggaactttatctaaattccatgggttgtgagtagcaccataatatgagtgttcagttgatgaacccatggcaaattcatccatgttggtcttacctacaaaggttacgccagcttttttaagcttagaaataactgttgcatcatacattggcatgtagttgtacaaaatgtgactagcagcagttgtcttaatcccgttagtgatgatgttatccttaattgcgattggaatacctgctaacttactcttggagtagtcaaggttatctgcaggcttagcatcatctaaaacagtgatccaagcatttaacttcttatctgtatccttaatgtttgccacagtgtctttagctaacttatctgctgacaagtcaccgctggcaagctttttgtttaatgaatcaatattttcgtttaagtaattcattactcgtcctcatccttattaataattacaggaaccttaatgtagccgtttgccttttcaggaacgttagccatcaatgtttctctgtcttgtccttgccagtgttcaggtttatcttctctgaagacagtatcacgatcaacaacttgaactgtttcatcaacaccctcagtatcaacttcactaagttgatcagccatattgataattgatcccatttgatcagtaaatttatctaattcttcttcattaaacgcaagtcgcgaaagagtcgcaacgtgtttaatggtatcttttgtgatttccacgcaaatacctcctattcgccgccataaacatggacttgataatcactatcgccggtttcttttgcaactaaagcttgtacatcatctactgaaccaattttgatttcaattgggatattgccagacaagtactttttagctgacgacaaaaccaaacgggtaaaactttgaatttgttcatagccataaaattgcgttgttacggaaatgttttcttgtgaaagcttaccgtttgtataacgcaaagttgccgttaccccactaatattagggaagtagttttgaatagccgtcttgaaatcattgaagtgcgatgcatcatcactgttaattgctttttcactaccagttgtcggtaaaacttgcattttttccgacatggatttccatttagatattttactactattagcggccgctgtcccgtaagcgaagtaagttccaccaactaatgaatcttttccagtcttggagaacaaaccaatcgtaatcggaatattctttaaagctttcttcttacgcaagcgagcaacaatttcattagctattttttcaccttgagctttttgctcagcacgtgaaatagtagtttgaaattctgcaccgttacgctttttctgataataatcaaccgaattcatggctaagcccaagctcataccacctaaattatacttggaaccagatccagtcaaataatcttgttcgataatttcttccaaataaattggattacgcgtatcggttccggtcttaccattatttactgggtttaaaccatcaggatttgatttggatttacgcattaaccaatcagttacagttgaggtatccaaatattgtccttcttggaagacgtattgattaggcgaaaattgattcttagaaatttgaatcagccctcgctctaattcacgcgtatcaacagaattatcattatcagtagctgttaatcctgcaatcggactaatattatagcgaccatttttcattaaaacggtatagccattcgttcccgtgttagtagtttgatagctttttttcttagtggttgaagtggttgtcgcattatttgctaaactagaatccttcaacttaccacaaccacttagagtaagcgcgattccagctaaagccattacttgcaaatattttttcacaataattgtcctttattcaatttgtgcaattgcttcttcttcagtcaaaagtggtacgcctaaagtctgcgctttagtatacttagaaccagcatctttgccataaatcacgtaatcggtcttatgcgaaactgaacccgtaactttggcacctaaagcttgtaattttttcgtaaactcacttctagtataatgctctaatttacctgttagcactacagtcttatccttaaatggattatcttcaatttctgcaggctcatctgcacctaggtaatccatattcaggccgctctcacgcagctcatcaattaccttctgtgcttctggttgagcaaaatatgttgtcattgattccgcgatcgtcatgcctattgtatcgatagaagctatttcttgcacgtctagagacataatctttgccagatttttaaacttttgagcaattaagcgtgctgctttggccccaacatggtcaattcccaatccagtaatcaataattcaactgagttttgctttgaattgtctaaggcagttaacaaattattgatcgatttttccttaaaatgatcgagttgtgctaaatcatctgcagttaagtgataaagatcagccacattatgcactaaatctttagcaatcaattgtttaacgatctttggccccaaaccggcaatgttcatagctggtcgagaagcaaagtgcgtaatgccctcctcaacttgagctggacaagatggattgatgcagcgcaaagctacttcatcttctaggtgaactaatttttgcccacaggatggacaagtcgttggaatctgataagctacagaatctgccgatcttttagccatgacgacttcagagatttctggaataatatcgcctgctttatgcagtttaacggtatcaccaatcctgatgcctttttcattcaaataatctgggttgtgcaatgaagccctagctacagttgtaccagctagttgcaccggatccatgaccgcagttggagtaactactccggtacggccgacagtccaaacgatatcccgcactacagtttcttgttcttcaggtggaaatttataagcaatttcccagcgaggcaccttaacagtgttgccgagctcttgttcaattcctagatcatcaatttttaacacaatgccatcaataccatatgttaggctgtttcgtttagctgtgtattcatcgataaaggcaaaaacttcatctaatgtttttaacttacgaccggtttcattggtatgaaagcctaaatcatgcattttttgaattgcttggtgctgactagtaatttcttcaggcggattaacccaagtataaataaaggtactaagttgacgcttcttggtaactttaggatcaagttgacgcaaagaacccgctgcagcattacgtggattagcaaaaactgctagaccttgctcttctctttctgcattcaacttggcaaaggcttccttgctcatgtaacattcaccgcgcacttcagttgttaacggttcaggcaaagtctgtggaatatcactaatatacttagcattagctgttacatcttcaccaacataaccgttaccccgcgttgaggcacgaaccaacttaccattttcatattcaagcgatagtgataagccatcgatctttaattccacgttatattcaactggatgaccaactaatttttgcatccgttgatcaaaatccttcagttcagctttggaaaagacgtcccccattgacagcattggaatcgggtgctctaccttggtaaaatcactatcaatctgtcccccaactctttgggtaatggagtcgggtgtcacaatctctggaaattctttttctaattcaagcaagcggttgtagctttggtcgtaaacattgtcttcaacctcaggcgcgtccttagagtaataggcctcagcccattcattaagctgttttctaagtgaagccgcttcttttttagcttcatcaagagtaatttctgccatttttccctcctgatccaaatcaatctttctttaattataccttcttaattggcgcaaaggcagccaaaagccgtttgattcctttaccagggaaagcaatatccagctccatatcttcaccagtgccattaactttagttacaacaccatgtccccaagctttatgctcgacttggtcgcctacattccagcccttcttttcagcaccgatagcgcctgaagctttcttagcagtataaacttcagcgcgagctcgttcggctttgcgagcaaatggtgccgtctgcttctcaaagctagattggataaagctgctttgtaatttttcattttcttctttgtgcagatcctgttcatcaatttcgtccaagaatcttgaaggcggattattttgcattctgccatacatcatccgtgagtaagcattagttaaaaacagttcttgcttagcccgagtaattcccacgtaagctaggcgccgctcttcttctaattcattgtcatccatcattgcacgttgcaacgggaaaagcccatcttccatgccaattaagaaaaccactgggaattctagtcccttagctgcatgtaaagtcattaaagctacttgattgtcatcttcatcaagatcatcttgatcgctaagtagagatacttcagccaagaagtcgcttaatggattagactcatcttcttcgggctcataatgatcatcaaaacgcttagtaactgacaagaattcatccaagttttctaaacgcgtttctgattcaattgtattttcagctcgcaaggcatcggtataatcaaaatcagttaagattttttcagttaaaccagttactgtaccattttgagcataagtaattgcatcacgtaatttagtaccaaaatcgcttaatttcttggctgctctagtattaattgaactttcagccacatgtcccatcgcatctaaaatgttgtagtgattttcatccgcaaatgttatcaacttatccacagtagcggcaccgattccccgctttggagtattaataattcggttcatactcatcgtatcagctggattagcaactaacttcaagtaagccatcacatctttaatttctttgcggtcatagaatttatgtccaccaacgatttgataaggaatattgcttttaacgaaagcttcttcgactgttctagactgagcattagtccgataaagaattgcgaaatctttataagcccgttttttatctttaacttcttcttggatctttgaaatgatgtagtgagcttcatcatcaccgctttgggcttgatagtaggttaccttttgcccatcaccttgatcagtccacaagttcttagccttccggttctgattatttttgatgaccgagttagctgcggacaaaatgtgaccagtagaccggtaattttgttctagcttcacagtcttaacatcatatttcttgtaatcctgctcaaaattcatgatgttttccatattagcaccgcgccagccatagattgactgatcggcatccccaactacacaaatattcttgtattgtgcagccaaagcatgacagagttcatattgagcctggttagtatcctgatactcgtcaactaaaagataacggaacttgttttgataatagtgcaaaacttcgctatcttttttaaacaaaactagggtctgcataatcaaatcatcaaagtccataatttgatcacggcgcaatctacgttgatattcttcatacaccttagccgccatcttctcaaatggtgacgatgcactctgcataaaagcttcaggatccagcaagtcattcttgccattagaaattgcggctaaaataccgcgtggatcatacatcttaggattgatattcaggtctttttcaatatgcttaaccaaagttaattgctcggccgaatcagcaattgaaaaattatgaccataaccaatcttatctgcatcccgacgcaagatccgcacacataaagcgtggaaagtcgacatccaaatgtcgttagctgctggccccagcaacttttgctcacgctcacgcatttcactagccgccttattggtgaaggtaatggctaaaatattccaaggtgcaacatgattttcttcaactaagtaggcaattcgtctcgttaaaacagaagtcttacctgaacccgcaccagcaacgactaataaaggtccttcagtggtttctaccgcttctttttgttgcggattcagaccagctaagatagatttttcgctcattattttccccttcactaaaaattatttcattaatgcaacttgaatattataccaaaaaagcagcgactaattcgctgctttagatttacttatcatatttttcaagatcaaactgttcaatcaaattaatcagcttattggcatagtccggatcagtcgcatagccgtcggtaaccaaagctttagcttgtgtcttataatctttggatgctagaacatgcttatactgatcgtggttccacgttgtcccattctggaataatctagcgtgagcccgaatagaagcctcatatgagtcatatatttggaaacgcgccttcacggtaacccacttattctttacatattccttagttgtcatcactgccgaagtgttcgggttggatcctttaacaccaaaaagattattgtatttttgcgacaaatcactttgtccataattactttctaggcaggcttgagcaatcgtgatgcttggcaataagtcatacgacttgtccacttcgcgcgcaatcggaccaatttttttgataaagtcttttttctgttttaatagttttgctgcttcctgttctttttgcagctgtgcttgtcgaatctgctctgattgaatcgcgtaacgcctataatatctaaagccgacaaaagcaaccatcagaataaatagaattacgaatacacgcacaacggttttgacactttttggtactcttgatttacgttttcttgccatagttttattccctttaattactaattaaagtataaccgatttttgagtaaaaaaaagaagtcgctcactgcgactcctcaatcagtgcgggcgagaagactcgaacttccacgatctaaagcgatcacaagatccttagtcttgcgcgtctgccattccgccacgcccgcggcacatcaactataatagcctaaatacagttgagatgcaagaaaaaatataaattattttaaatttctgatcattttacgcaaaagtttgcgctaaacgcaggtgtcccctacatttaccacaacgatacttttgtgtattaatcctgcgcattcttggatatctcaacccacagttttcacaaagatataggtaacgatattttttctttttacgtaagccaatatcaggtgcataacgactgcctccaacttttttcagcaagattttaaaattgcgatcacggtgtcggtaacccaagcccaataaatgcaaatgatagtgggttaattcatgcttaatgattcctactagataatcatgatattgtggtactaaaaaatgcgcgttgatttcaagatggtgatcatccaaatgataacgcccacctgttgtggtcattcgccgattaatttttacacggtgcttaaaagggcgatcaaaatattttatcgaaatttcttcaactaaattttgtaattcattctcattcatggataaaattttattccaaaaataaaaatcagcaagaatttaatctcgctgattttttgctacctaaatatcttggcatacatccccgcctgcttaggcgtactaatgtgtcgtttcaagaaagttactaagtcatgtttgaatgactttttaccatccatccaggttccagtgaataagtgaatcgatttggagtccttagaaggattacacagaactccatctgaatagacatgaatgccatcttttaacacttgctcctgattacctagctttaagccatacttatttaccagcatttcagtaacggaaatactatttactcccgccatctgattcttagtgtcatattcaaaatcacgatcttgataataatccaaaatatcctgcataaatgggtggcctttttctgcaccaaaaattgcagctgacagataatcatggttttcaaaaccaataaaggcagaagcattcaaaagactatctaacttatccacgactctaacatcagtatctaaatatatcccaccttgttcataaatagcccgtgctcgaacatagtctgacacgaaggcccatttttttgcagcataagcttgttcaatataacggttctcatgcatatcaaaattatcttcattccactcaataatttgataatcaggcaattttttcttccaggttgcaatacattcttcaattatcggggatttaggattgtgtcctacccaaacataatgaatttttttaggaatcatttttaacctcgcttcaaaaagttcttaattagcttcacaatatcatcattaaaatcaagcttgaacaagaacatcaatgtcagataaataattaacatgacaattgacttaaaagccatattgaaaaaggcagacggaattatattaggcataaacattccaatagccaaggttagcaccgcaattaacaaatacttgggcacgtcatggaaaacataactaaattcatagccatcacgtacaacccagagccgcaaaattaaaactactgcttcagtaattaatattgcaatcatagccccaactgcgccatatggcctatctaagagataactcaagacaatttctaaaattgccccaataactactggcacagcataatccttgtctcgctggttagccaaagcaaattggttagcaaataccccgccagtcggaatcatgataattgttaaggtaaaccaaaacattaatggagtcatcggaacatatttattaccaaagaaaaacggtacaaactgcttggtatttgccataataattacggcgaacaaggtacccagcattacagtagcttccagtgattttttcatcactatcttttgtgccttttttccttcgctcgccatcttaggcataatgactagcgaaatactggtaattacacccagaatcatatttgaaattcgttgtgaattgtcataaaaagaaacctgagtcgaattagaaaaccaacccaaaattggtttatccagcgaagtataaatttgagtcgcaatctgtggaatcatcaaagtaccaattgcaattgccgtctgtttaaatttgtaaaaatgagcaacgggttttcctacatagcgccaaatatcaaaccaaaagaccaaggaacctagcattgtcgacactgacatgatcaataaatatttccacaagtcagcgggtgattttacccataataaaattagaaccacactaactaactttaccgccatgtttttcaaaacaacacgaccaaagtcagccagtccttgaaagaaccatgaaatatcaacctgtgctgagatcaagtatggcaccatcaacaagatataaaaccaatattgaacgtgaaatacagtcgctacaaaaaccgtgactaaaatggtgataataccggcgattccttggaaataccataacccccagaaagcattggttagctcctgcggtgtaccataagtgcgcgtccgtgaaattgttcgcatccctacatacgacacagacagaatacaaaaaatcatcaagaattgcactgtattgttcacactgctataaatcccataagtcttaggacctaagacacgcgataaatacggtacagtaatcagtggcaccaatacaataaaaatctgataaaccgcattatataagatgtttaaaaatgttttacgcattttaacctcgatattcctgcgtcatgtacttaaagacgttctcacaatatgaatcaccatgcacctggttagtcaaatgtagccagtaaagacggcgattagcaatctgctggttatcaagttgatccagattgcgaattagttcatcctctgaattaacacagattccgggagtaatctcagcatatggtcccattagtaatccgcgcgttttttcatattgctctaaaaagttagtcacaaacacaatcggtttgttcaagtgcaagtaatcaaagtagattgacgaaaagtctgtcatcaagaaatcagtatcaccgagcaattcgtacaaatcataattgtggtcaaacaagtaatcattgttcatgaaagcaatgttagaataactgctcttgaaattggcaaataagcgcatttcatagggatgcaattttacaatcagatattgatgccgcttctttaattctgtatttaatttttcaacatcaaaatcccgaaaggcaaaaaagtttctctctttgattttctccataatggatttatcttccaattcataacgaaaagttggcatatagatcccgatctgtgcctgatcgtcctcagttttaaataagtcagccaacaattgtttcttcgaaattaccggcttagccaataaatccaaacgcggaaagcccagcttgcggtatttttttgtctcaattgccatacaagcactcattagtgattcatatagatcagagctagaagcaacaatatccgcattcttgtgccacaatttttcgttacggcgattgtcgcgtcgcttagtattattagccataattcccatgcgcttgagtggaacgccatgccacaactggacattaatttgatgcttgcgcaccttaaatggttggtgcgttgtaattacatatcgcgctgctccgattttctgccaggttttccacttcaagtgtgacgatggccacggctcaactaatgtaacgttatattcaggatgattcaattgcagccacttgtaaaaagcatagccgttagatccagacctacctgaaccattcaggataaccacattattgttttccatcgtggtaaatctagccaaaaaactcatccaagccaaataaagacggaataaaaagcttttcattaaaatacttccttaaaatagtctaatacctaaagcatataaaaaaagcttgagcaaactcaagcttttttctttatttttgttaaactttattctttacccatttttctctggcagaatttaacaatttcaacaatcaaaaccatcaaaattccggcaattaagatgactaaccactgtggtccatcaagttcagtcacatcaaagaacttagtcataaatggcaattctaccgctgccataattacagcagcaatgataattgcaccattgaaccacttgttagaaaaagtatgcggtctaaaaatcgactgatgtacatacttggaattaattgcatggaacagctgaatcaagcccaaagtcaagaaggccattgtcaatgcatccctatgttgcaacgatggatcacccacatgtggaccgacatgcaaaccaatttggtatgcacctaaaactaaaattccttccaaaattccttggtaaataattgaactggcaacaccaccgctaaagaagttagacttcttaccacgcggcttgcgcttcataattccaacttccactggttcaacacctaaagcaatagctggcaaagtatccgttaccaagttgatccacaagagctgcacaggagctaagatatcccaacctagcattgtcatcatgaaaactgttaatacttcacccacgttacaactcattaaatatagaatggccttttggatattactgaagaccttgcgtccttgctttactgcttcaacgatcgtggcaaagttatcatcagccaaaaccatatcgctggctcctttagaaacttcggtcccagtaattcccatgccgattccgatatcagcttgcttcaaacttggagcatcgtttaccccatcaccagtcattgcaacaatcttgtcattagcctgccaagccttgacaattctaaccttgtgctctggtgaaacacgagcataaacgctgtagtcaccaacatgctgtttgaaatattcatcatctagtttatcaagttcagccccagttaaaacgcggctatcctgacctttttcaataatacctaggcgttccgcaattgcttgagcagttgtttggtgatcaccagtaatcattactgttctaataccagcactctttgcttcagccacggccgctttagcttcaccacgttctggatcaatcattccgactaacccagcaaaaattaaatcttgttcaacattatcagttgttagatcggtgtacaattggtcgactttcttataagcaagccctaagacacgtaaagcttgttgcgccatctgcttgttttgcgctaaaatattttgcttctgcttatctgtgatcggctttttcaatcctagttactcgctgtaacaacatatctggtgcgcctttgaccgctacaaagtattgctcgccatctttattaacagtactcatcaatttccgttctgaatcaaaaggcacttcttgaattcgtttgtatttttcaagcaagtcagttacatcaatgttttgatcaaaagcaaattgaatcagggcggtctctgttgggtcacccaataagtctccgccattttcaatcttagtatcattagccaaagtcattgccaataaagctgggttattttcgctaatactttcactattatcatgtaactttttatcatagaagaccttttcaactgtcatccggttctgggtcaacgtaccagtcttatcagaacaaataatgtctgtagcgcccaatgtctcaacagcaggcaatttacggacaatcgccttatgtttggccatcgtttgcgtacctagtgccaaaataatcgttacaattgctggcaagccttccggaattgcagctacagccaaggaaacggcaaccaagaacatgttaatcattaaagtagagttacgctctgctggatcagccttgagcactcctacgataaagacaataacgcagattgccaaaatcatgatggttagggtctttcccagttgattcaagtttcgctttaacggtgtatcagtttcatcagcattgttcaacattgtagcgattttaccaacttcggtgtgcattcccgtactagttacgattccttcaccacgaccataggtcacattagtattggaataagccatatttacgcggtcagctaaagcaatgtcttcaccttctaaagtttctgcatgcttttcaactggaactgattcaccggttaacgctgattcctcaatcttcaagctgtgggcttgattcaagcgtaagtcagcaggaaccacatccccagcttctagtaaaactacatctccaggaaccaattctgtgcttggaatagtaacgattgtatcatcacggcgcacatgcgcatccggcgtagccatttccttcaaagcatcaatcgcagcttcggaacgtgcttcttgaaagacgcctaaaattgcgttcaaaatgaccacaatcataataattgcggcatcagtccactcatgagctaataccccagacaaaatcgcggcaatgatcaaaacaataatcataaagtctttgaattgatcaataaaacgcatgaacatgctttgctttttcttggaagctaaggcattcggaccatattgctctaatctagctttggcatcactagcacttaacccatccttaacggacgtgttaagatctttttcaatgtcggggatcgactcgacataatattttttcgccattttccctctgctatataaaacatagaaacatgcagaagtttgatattttccacataccagaaaaaaatatatttttcctttcctaattttatttactgtcgtcatcattggtattccgatattccatctggggagtaatcgcattgaccaactcctgcagcttaagggtttagccagccccattatcttttattttgttaatgccaataaatttaatactgcattgtcatcacgatcattgctatagccacactcataacaaacatattcattgtgcttggtgccatgttttctattgccctgcaaagtgattttgtccgcaccatttttgacatagccgcaactagcacatctttgcgttgacgggtagcttctatcagccaaaattagctctttatcataccaagcacatttataggataatatctgtctaaatttgccaaacaaggacctctgtatgcctttggaagccacatgcgtcatcatcatttgcttgacattcaagtcttcaatgacgatttggtcataattatttgccagctcagtagtaaatttttgcaaaagatcattctgaatattgaaagccctgcgataatcacgctgaagcttggttctcacttgcacgtaattattgcttcggccagccaattttccattaactctttttttcttggccaatattctctgataatgcttgatccgcttgtacagtttctgcagtcttgccggcaaaatattgattctgccctcagtatagctgaagtgcccaacgttgacatcgatggcggtctttttgccagttttaacctttattccagctttttcttcgtaggaaagagcagcgtaataatggcctctttctctaaagatgctggcaattttaacctgtttcatcctcaatgcttcatatgttggaatatcaaaccatgatttaattcctctgggcttatccagtctgagcttgccattaataactttaactcggtcagtcttaaaaccttgacgtggagctttctttgacttgaaatgcggcttgccccagtcgagctgggctttgtcaaaaaagctcttcccagcgttggccaagtccttgactgccaactgcagacaacgagcagacaaggcaaactgccaatcagccttgttattgactaattcatctcgcacccgacactcattaggactaggattattatccttatttaaagtccgtgcttcatacatatcttgccaggtttctaaggctagattccagcagtatctgcggtaatcgcatagacggtcaagttctctttgcatggtcttgtttggttttagctcagctacctgtgttttaatcatttatttcacctccaatgcaaacataaatttagcaaaggatgaaacaaaaacaagcgaacaaaatattaaatttttagcagcagctaatttgtttctatgttttatcttcctgatcaaattaactgcatctttttctatttattgctatcaaatcctatcttttagtcaatcattatttcctcctcaaaaataaaaaagagacttacatgcttgtagcacataagtctcacgaattaagataaatccagaagtatcttacttcggctgttggattcatcgcaagcaattgctgttactcccttatgacaagttaattataagcaaaattttagctatctacaagttttagcgaattgcttttactttttataaaagtcatcaaagacagtaactggcaaatgacgcttgtgtttactcttattccataatttttcaatttgatcagctgttttatctgatacttccttaccttcaaggtaatcatcaatctcttggtaagttacaccgagggcaacttcatctggcaaatctggcttttcttcttcaaggtctgcggttggagccttttcatataaatgcttaggacaacctaattccttaagcaaagccttgccttgacgcttgtccaaacggaacaatggcgtcaaatcagcggcaccatcaccaaacttagtgtaaaagccactaaagttttctgcagcatggtcggtaccaacaacggcacccttattagcaccagcgatggcatattgaactaccattctttgccgcgccttaatattgcctttgttaaagtcagtaatcttttgaccagttgcttctacaaccttcaccatagcatcaactggttccttaatattaacaattaaatcctgatctggcttttgaaaagcgactgcatctgcagcatcttgggcatctgcttgaacgccataaggcaaacgaacagcgataaattgataagaatcatcgccagtttcctcacgcatttcttcaattgccatttgacacaatttaccagtcaaagtggaatcttgaccaccagaaatacctaagacgtatgacttaagaaatggattagcctttaaataatctttcaaaaaatcaattgaacgtctaatttcttttttagggtcaatttctggtaaaacatgttcataagcgataatttctttttgtaattctctcatcgaccaatgcttctttctctaattttacgccgaatgtcttgaatcaaatccatcttggattcgtataagttttgtgataaatccactggatattcctgcggattcaggctacgcttatattcatcccataaaccatcaaggttgtcagcacagaattttttaatttcatcaagactaggttgatcataaactaattttccatctttaaaaatatcatgtaaaagtggaatagcagtgtaatcagttaccaccttattaatatagttatattgtgggtggaacatgaagagcgcgtcaaatttgcgtggatcttcattataccgagatacccagtcaccttcatttttcttagcagtgtttgcgctaatccgccatacttgttttttacctggggtggaaactttgatggcatttgaagaaatcttcaatgtatcccgcatggcgcctaattcatcttccatggcaaccaacttgtaaacagcaccaagggctggttgatcataagcagtgatatacttggtcccaatgccccagacatcaattttagcgccttgcatctttaagttagtaatggtgttttcatcaaggtcatttgaagcaaaaatcttggcatctggatagccagcatcgtctaactccttacgaacttgcttagaaatgtaagccatgtccccagagtcaattcgtacgcccaagaagttaatcttgtcgcccatttcattagccaccttgatagcattaggcacaccactacggacagtatcgtaagtgtcaaccaaaaaaacacaattcttatgtgtttccgcatatgccttaaatgcgtcatattcactgccaaatgcttcaactaaagcatgagcatgagtccctgaaataggaataccaaacaatttaccagcacgaacattactagttgaatcaaagccgccaatataagcagctcgagcaccccaaatggccgcatcggtttcttgcgcacgacgagagccaaactccattagaccatcatctttaacagctaacttgattctagcagctttagttgccaataaagtttggaagttaataatatttaaaatagcagtttcaactaactgacactgggcaagtggaccttcaacttgcaaaattggctcgttagcaaaaaccagctcgccttccttcattgaacgaatagtgagctttaattttagattgcgtaaataatcaataaagtcatcatcgtaaccttcattttctttcaaatattgcaggtcactttcggtaaactttaaattctttaaatagttaatgatgtgttccaaaccagcataaacagcataaccgttgccgaatggttccctgcggtaaaaactttcaaaaacggcattgcgatcaacaatccctttcttgaaataggtatacatcatattaatttcgtataaatcagtgtgtaaagccaacgaatcgtctttggctaattctggataaaacattgcttctctttctgtcattaaaaattaacaatttcgtttttcattatacagccattacagtccattggctattctcaaaactatttttacctcaaagttaaatacactttttcaattgagtccagttgatttttaatagaaaaatgctcttccgcataccgcttttctgtattagccatctggcgtaactcttcatgggttttattaacggccagattaatctctttagcaattgaatcaatgtctcccgttttagcaatgaaaccatattcgggtcctggaatcattttatgaatatcacctacatctgtggacaaaatagggattaaattgtctgttgcctctaaaagcacaagtggaaaactctctgaatatgaagttaggacggctagatcaattcgcttatataatccgctcaattggtgttgagtcataaaaccgtgaaaagttacttgtggtgccatgtccaattgccgcgtcaaggccttcaatgcttcaagctgactaccatcacccgcgatatgcagacgaatatgctgatcatctaattttttcacagcttttaagagcaattcttgtcctttaaccttttccgtacgagcaacgttaataatattaaaataggtatgttcatatttagctggaatttcactatcactgtggaaaaagatgccattatagatgacatgtaccttgtttttatccacatgtgcgcgattaattagtagcctggcaaaacgctgagttactacgaaaatacaatcagcttttctcaacgcacgtaaattaagtttagtaaaaatattgccaatgattcccctaccttcaaagtctagataaggatctgaatgtacagtaatacaccaagctgcacgaattcgcttgtgaatcaaagataaaaataagttggcacgcgcaccatgagtatgcacaatatcatagtgcccctcattgataaacttagtcagtctacctaaactgcctaagtcataacgactattagctcctagcacatgtgtagtaatcccagccgctcttgctgcttgtgctactggtccttctgccagcgttaataattcaaaatctttgccttcatttttggcttcagttaacaaattaacaatatgtgataaaccgccgccattttctaaaccagcatttacatgcaaaaccttcatcttagtaaaattattttcccttcttttttgactgtttaactcgcacaacaaactgtggcaaaactaacatccgcttaaatctgctaggattagtaatcaagcgataaaaccactctaaatgcgtcttttgaaaagcttctggtgatcttttaacgatacctgaaaagacatcaaaactgccacccacacccatcatcaaagctggtgtttcgttcttacgtaagattgatagtagtttttcttgcttagggaaacctaatgctgcaaaaaccatatcgggttgtgccttctgaatgcgccgtgccactagttccaaatcttcagtaaagtagccgtcttctgcaccaactagattaatatttgagtattccttagcaattttgctttgtactgcatgaattacttgtggcttagctccaattaagtaaactcggctaccacgatcgttagcaacatccatcagccaagtaaacaaatcatatccagtcacccgctcaggtaacggctgcttaagcattttagctgcttttacaatgccaatcccgtcagcagtaatataatcgggatcattttttagaattttcataaattcaggattctcgtttgccgccatcacaatctccggattagcggtcacaataaaggtcgacaggtgattatttagtcgattaataaattcattttggaattggttaaaagttttattatcaaaatcaacacctaaaatattaactttgctcattttcacacctcatgcgttttcttatctagtttctattctaccattccgacacgcaagtacgagaaacatgttgtaagtgtcaatgtttttgcggtagcctttaaaccattagtctaaccttaatttcttaaatatttatatgacttaaatttctgcttagcttgcttaaataactattgccaactacctgtgcggttaatgcgccatgctggatgcctaaatgaacttcatgacgcttctttaagctgtcacgggccgctgcttttaattcctgttcagtcaatacagttatttctgaatcttcaaactcgctgctaagccaaaattccagctctcgattcttgatgcagcttaagatcctaagcatgccttctgctccagattttgaccatttcttgctttgccccttaacacggtaggtatacttgcggtggttgctctcgcagcagccaatggctttagtcacagtcagttttcgtttcttaaacggcttaatatcgtcccaatgacgatcaatataattccttaggcgccccagataatcatgattgagctcggtattcaattcatcaattagtcggctttctgcagtggttaggatagttttaactttgtcatagctgtatttgtattccaaagcagaaatcagcttgccttgcaggtcaggcgcaaaatatagcctttctttgattttcttatttaggtgaaagacatccaagaaatgctcatgacgcttgcatagccctacaatgtcatcgaagtctgttttggcatatccagcaccgccatcggcgttgctaagaattacagtatcagaaagatcataagtattggccaggtactccttggcttcgttcagcgcatcaagtcggcttaaagaaacaaattccttggcattgattcgctttctgcgtttcttgcttatattgacaatgccttcacagacctgatagcgatgaaattccaaccggcttttagtgcctttgatcaccacgccatcgccttcaagatacaaaactgggacctttttcttagtgcctgcggcatcatatcttgaatctgcttcttggcccgctttaatatttttcccggccatttttaccaaattgcccacctgcatatggctaatattaaagccagacaggcaattgactgctagagcagtattgcgataagtggcaacgctgcttacttctaagatgtttttgactgctaaaatactgtagcgcttgtatttgtcaaagcccattaattcatccaagggataccttgcttgtttgcctgggcagacatatcttcttctgacatacctaacttcgccaaaagccatattgattgagcgctcattcttcttatcaatctgatagccctgtgctttaaccttggtaatcatttcatcatcaactttagctaaagccaaggccatgatttccttaatcaggtttaagaagaaacagattatttttctttcacgcttaatataattatcttcagactttataatatttgcgatttcagttacaattgaattcataaaagaccagcttctaatgtgttttttgttcttaacatcagactactggtctttttgtttgagctcaagtccaaattcaaaggacttgggcttttttaattatttattcaacttaccgtaaaaaattatacacttagaaacatgttcaagttttatattttattcaaacatgataagattgttttaataaaggagaaaaaatgaaaagagttattacctatggcacctttgacctacttcactacggtcacgtgcgactgcttaaaagagctaaagaattgggcgactatttaatagtaggtttatctaccgatgaatttaacgaattcaaaaaacacaaggaagcctacaatacctaccctgaacgtaaatacattttggaagctatccgttatgtcgaccaagtcatccccgaaaaggattgggatcaaaaaatcaccgatgtacaaaaataccatatcgacacttttgtcatgggcgatgattggaaaggaaaattcgacttccttaagccttattgtgatgtggtttacctgccaagaacgccaggaatttccactactaaaattaaagaagatcttaaataaaaaaatactccaattccattcaatttgaatgagattggagtttttgtttacttagaaaaagtgaattcaaatcgttctgcaacgtaacgtgcgcgggtgtattcgaatggttgcccatctgctagttcagttacctgtcgtctagtaattaacggttcaccttttttagctttaagaagacgcgcatcttgctcgttggcaattgatgcagaaatatgttccgtcactcgtccaatggcaaaaccaccgcgcttttctaaggttttatataagtgcgttgaaacatcttctttagaaaaattctttactaagtagtatggcaccgttacgacttcataacaaattggtgtcttatcagcgtagcgaatccgctccatccgcaaaacgttctcattatcttttagcgcaagacgctctttttcagataaagatggattgccaatctgataagaaattaacttacttgaaggaacttgaccattagccttagtaatctcagtaaaggacataattcctgacattttttcttgaaccttttgactagctacataggttccgctacccaagcgccgttctaaaattccttcatcttctaatgttttaatcgcttggcgtaaagtcattctcgaaacgccaaacttaactgccaattgacgttctgctggaatacgatcccctacttgataaacgtgattctcaatatcacgcttaatctgattgtgaatcttgatatacatcggttcttccatagtcgccacccccaaagtttagtactgctattattataatctaaattggtctagcttgcattaataacactgcttcaattttacagactattttttcttagcggtccacttcactccaagaatataaacatttggacgcttgttatattccacttcaacttgttcattatcattagcaactacactggcactaaattttgcttcatctttaacagctaagttagcctgattaggattcagcacaatattgtggcccttcatattagcttcaccgctcaaagctaaaaagtactcatagttcatatttccagtgaaggtaacacgtgtagcatcacatttcgcctgatcttgaaaatctgcatgagctaaaattacggcattgttcattgtaacttttgcttcatcaactactatcattcgattgatggttgaattttgaatgattgtccgtgtctttttatcaatataaaccccacccaaaaaagtagaattcataatattgctccagcagtcatcacttaaataaaggcaggaatcgctagcagacttaacttttgaattaagcatattcatccaagtttgcccatgcagtaatacataatctacttccgaattattaagatccaactccgcattcgttttggcaaaagtattaatactgccgtgaatctttgaattatttacaattgctgttccttcgccttcaattgccaaagcacaatatttgtccgagaaataatcaatttctgaatcattcatttccaaacggaaattggcatggtcatacatggaaactgaaccgttaacaattttggttgaataaagttccaacgtgatcttaccattaaccgcgatagctgctgtatcagttcccgtgcccttaataaagcaattacgcaaagttaaatagccatcaacgcctactggtacagctaggctattatgttcggtagttgtatcaatgcataaattttctaaagttacataacgactatcttctgaaacactaatatagccataaatagtcgtgtcttctggcaaagagcctgttcccttaattgtgatatctgttagtgtaatgccctgcggcaaataataatatccggggcccagcatcaacacatcatcggcacgcaaatcctttaaagcctcgtgccaactgactgaactgctagatccccctactctaattatcctagccatccattatcctttcatctcgtaaaaaccgattactattgtactaattttcttcaatttatgttgtatttttgctcatcaaaaaagctaggttcgattcctagcttcttatactatttcattttaacattccagtaataagccacattaccataaggagaaagttgaaaacctttcactctcttattcaataagtatgacgtaccttgttggaatagtggtgccgcaaaggcatccttttgaattaattgtttttcagcgttaactaaggcattcaatctcttctgcggatcagtggcataagttgaacgagccaagtcaatttgcttccagaagttagcattgtgataatctggcgctaaattaaacaaaccaccaactgtcaagaaatcaattggatcttcataacttggctgccaagttccgtaaacaaagtcgtaattgtgattagttgtgttagatagccgtgacttcaaaggaattgaccgtacccgtagagttagaccaggtaaatttttcatcaaattgctttgaataaattcacccacacgcttagcatcgtcaatatctgaagtaagcaattctaaggttagcttcttcttacccaattgcttcaaaccaagttgccattcctttttagcttccttggcattataggtaaccaagtcgccagcatccttgcggtaatcgttgccagttgcctgatcggtaataaagtttgcggcaacaattccatttgacaccttgccttgatgcaaaacggtcttgactaactgttgcttattaattgcccggctaatggcccgacgaatatgaacattgcctgtactcttacgcttcaagttgaaagaaagataaccattagttggcgtaactttggtatgatagctagaattattttgatactgcttaacaaaatcagaagtcaatgtcgtgtaatcaagttcaccacttctgaataagttaaccccagttgaaggagtttgaaccacttgtacgttaactttattcaaatcaacaattttcttgttccagtaagttggatttttcttgtaagtccacttcaaatttgaacctgtccaaccagatacggtaaatggaccattgtaaactagattcttactgctagtcccatacttagagcctaactttttaaccaatttagaattctgaggatagaattgtgcaccctctaagatttgtggcaaatatggaattggattagctaatgtaacttgcaccttatacttgccgagtgctttgattcccaatgaatttaccggtgctttaccttgagaaattgcctcaccgtttttgataatggcataagaatcggcatctaaagatgaattttttgggtcaacggttctgcgccaagccgttacataatccagggcagtaactggatcaccgttagaccacttagcattattgcgtaaggtaaaagtatagaccttctggtctttagaacgttcaacttttgtcgcaccagctaattctggctgatttttcttattaaaacggtaaagaccttccatggaattctgcaaaacttctgaactagtcgtatctccatacttgctcgaatctaaagttgaaatttcatttgtgacagaggtattcattgtcttagtcggtgcagcattactgtcattgttagagcaagctgccagcaccaatgcggcagctgctgtcatcactcctgaaaaaatccattttttacgtctcaatcttctcacctttacttactttttgtttaatacttacattttacaagtatatctaatacggaagaaatttcaaatactttttccgtataatagctataatcaatacgtatacaaaaatggcaaaaaaagaaacgtcacataggacgtttcttttttcgggttgggtgttcttttagaactattgggttagctggattcgaaccagcgcatgatggtaccaaaaaccattgccttaccacttggctataacccaataccagctgaactttttacttgtcgttcaacaatggaggagggtggattcgaaccgccgaactcagagagagcggttttacagaccgccgcgtttagccacttcgctactcctccgttagctgacttaattataataacgaaaatccaaatcaaatgcaagacttttttgaaacttttttcaaaaaaaagaagaagccatgacgacctcttctcaaaatttaaaaattgatttatatctaaacagttaattttaagcctaatgccttttgtgctacttgatttaccagactccattgcttgtcataagttggtgaaaagaagaaatctgcttctgctaaatcttccagtgtcaacttatttctaatagctaagctcaaaacattggcttggccactaatgtcatatgatgaaagtacgctaccgcctaagatttggtggctgtcttcattataaacaacagcaatatagcaagtaggattatctttttcaggaatatagtctggacgaagataactctttaagactgtttcttttgcattaattcctgctcgcttggcattcttttcactgagtcctgttgttactgcatgtaaatcaaaggcttcaagcaattgtgcaccaactaagcccttaaagacacgttctggcttgtcttcaaataagtgctcaacaacatattgagcctcatgccgtgcagcaatggcagatggcatcggtactcttctgttagctggaatgctaaatgggaagattgcatccccaattgcatagacatcctttacattggttctaaagtaattgtctaccttaatgtagccattgtcataaagatcgatcgtgtttttcaaccaatcagtatttggcttaataccaactgtaataatgacacaatcagcagtaatatcacccttatcagtctgaactgcattgacctttccattgccaacaaagccagtaactttagtgttcatagccaggttaacaccatgatcagtcaattctttttcaaataagctagtataagtatcattcaaataattttctagtggtttttgcccaccgtcaattaaagtaacattcttgcctgctttagcgaaaacctcggcagctgcaattccgttaccagcaccaataactgcaacatttttaatagcttcatcttgagcagctgcattgatctctgtagcgcaatcatagcctctcatcaacataatatttttcaggtctgctccaggaagaggcaaacttgcggggttaacacctgaagaaataattagcttatcataactaacttctttggttgtaccatcttttacgtttttgacagtaaccgtctttttagctggatcaagagctgttactgctgtgttattaacaactttaccaccccgttcagctagatcttcaggagtaaagtttctaacgttgtcttggcctgtagtttttccttcaaggaatagcttcattccgcaagacataaaggaaacgaagtcgcctgcttcataaatcgtaacgtctacatcatcataacgatctaaaatttcataagctgcctcttggccgccgtgggatgcacctacaataatgattttcttttttgacatagcctgacctcctaataatgcagcaataattgtcgtttttaagtaatagcagttattgtaactggttacattatttatcttttaataagatatttcaattaatttgcttttgattagtgcgaagcagcaatatattttttatataaaaaagagcactactgatagtagtactctagagggaaattttccaaaattatcttatttagctaattctgctgatagatttcgttcactaatttagtgatttcattacgattaagaacttcatcatacatatccattgtttcctggattgtattttctaaattagtaccatgatttttggcatagccaataaacttttttgcatctactattttagcttctttaatcgctttttctgcagctcttttagcaacttcattcatctcatattctagcttattcatgtcttcgacccattttccgctattcacgtagtagtcgatatccttctgcaggctgatatccctgcgtagtacatcatccgtttttctagatcatttttacgtgttgtttgcatctcaatatcatacactcgactttgatcatcttgtgcccagatatctaagcgaatgttttgggattctagtccaatgttgccgtcatactgggtaatgacattaacttttgtcaattttaattcaggaaacatccgacgtagcagttccagacaattctttttattgctcataacatgaccgaataccaagtcgttagtaattcgaggatatcgattaattcttctcctcatattttacctcttttctttttcttaagtaggaaaattaccctccactatttattacgcaaaaaagtgcaaatttttttcagaaatttaaaaatttagacacgaaaaaagccgatgcaaatgcatcgactctttcagttaaattattctactttttaatagaagtttacagccttgatgtaacgcttgttgttgtttctgcagccttcaattctgtagtacttcttaccgttcttaaatctcatttgaccaccgtaagtagttacagtttgacctctgtacatcttaccagtacctggagtacgacggtatgatgaccaataaatgtaggcattgtgcttaaaagtacgttggttaccagtaatgttggttacacgaacgtattcgtccttgttagccaccttgtagtaagtcttaccgttgatagttacaacagttggaacgatttcaatgtcgttgtaagcgtagtacatgtgacctaagtagttaccgttcttgtcataagctcttgaatcaaccattactggcaaagtcttggtgttagtgtcaccagctggcttaacaagtgatgaagtcttaacccaaatgttgcttgagttagcatctgacttagacttagttgaaacttgtgagtatgatacattgttaagggttctagtttgatcagcaacgtaaacagtgtcaccatctttgaaagtagttgaagctggtcttacattaatgccataaatgtggtaagttgcgattgagcttgcgccattagcatatagagcttgtttgtggcttgaagtaattaaaacagtgtatgttgcagtagtcttcttaccagttaaaccagtagcagttaaagttacattatagtaacgtcctgcttctgaagtattaacaggatttgaagttgcttctagtgaagcagctgtattattattgctgttttgtacagctgaaataataactggctcaccattactatttacaaaattagttggattaaattgtgaaccaacagctacttggaatatttgaccattaacactccccttgctttgaccattcaatgaccaattgatcactggattttgagtagtatctgtagttgaacttgaacctgaaactacaactgggatttgaacagtagctgtttgcgtagaagtagaacctgtaccagttaaagtaagattgaaatcactagttggtaccgcagtaatattcttgttatctttatcaagagttacacctgcattcttaagaatagcagcaacttcactatctttaaggttaactttttctccactggcattattcgtactaaagaaaactaatcctaaatcattaattgccttagtaacactagctacagtatctttagccttaatagaaatagtagttggtacaacattagctgttttatcggtagtacttgcagcatcaattacttgattgccatatgtaaagtatgatctatctgttggctttgctgttgttgctgtagtagtacttgtagtaccagtagtgttagttactgtacctaaactaatagcagcgttaactggaacagctgaagctgctacaggagcaactgccaacaaagcggcagcagccatacttacaattcttgtattctttctcataattatgtggcctttcctttctgaaacagaaattcatcctaagcagtaagttatatcttcttctgcttgtgaaataattatagcatgttacgaacccgattactaaaaacaggatcgactcgtgtgtgtgattttaagaatacctcctaaaatcaccagtaataccctaccctttatttgttaaactgtagttaccggacttttacaattaagattcaaaacattacatttttgtgaagttttaaacaagttattgatttatgacagaacttatgtgtgttaagaaaaggtaattttaacacttgttcgcttaaaaaaattaaagctcttagattttttgattagaaataattgcttcatgttctttaatatgctcaactcgccctgcatcccccgcaataagtaacaaatataatgcctcaatcattgtcatacttgccacgcgtgagaaataatactgcgattgcatcaccgtctgccgcactgctgtctttaaatgcacatcagctaatagcgcaatcggtgaatcatcgcgattggtgatcgcaatcaccggcatccctttttgtttggctaccttaatttgcttaatgattcccgctgcttcacctgaattcgaaatcaccaacaagcaatcctttttactcaggttcattgtctgcgcaattgccgtttcaatcgtgccacctgaatcaattgccaacaagccaatctgattaaacttatacactgcatcagcggccaccggataagtatcgccctccgcactaacctgcacaattctgctttcagtcaaaaaatgcagcacctgatctaatttggcttcagtcacattctccaaagtcgccttaatctcggcgactttatttttttcaatcaattccaaattagcactagcatcatcacgtgacatattttgaagtgacacactttcagttgcattctgagctagttgaatttttaaatcatgaaaacctgtcaaatctaaattatgacaaaaacgcgtcaccgaagcatcactcacctcagcttcagttgctaattttgaaattgtataatttaccacctgttcgggctgttttaagatcacttgagcaatcttctgatcactggctgacattgtcgctaatttactatagattgtatcgataattttagtcattattctcaccttttctgtgccaaaattatatcatcaatgtaattaattttcacaattttatttttaaagaaaataaatttatattttgattgacgaaaatcatttaccaaggtagtatgtatttgtaaataattttcacaggagaaaataaaatgaaaattaattcgataagtgacctcgctttaagtaaaatcaagccgaaaatgactatttctcttggcggcggaagcaatgtatttaagttatctcaagcgattgcacagcataacttagacatcacattatattctccatccgaacttactcgctttaggtgcaaagaactcggattagagcttcttccatctactgcagcgactaagatcgatattgcttttgatggttgtgacagcattgataagaattttaacgttctaaaaagtttgggtggaattcatctttttgaaaaacaggcagcacaaattgccaaacagtttatcctactcttacccagtcaaaggatacaaccgattctgaatcctaaaattccactttgtcttgaagtggcaccgccttgtgttaatcaagtacagaagtatttaagcagtttacatttaactagtaagattcgacaagatagttcagtagctgcatttgcccgtacgcctttgggcaactacttaatcgatgtttttaacgaagattggcacaatatcactgaacttaatcgtcaactttgtttacaaaatggcgtagttagttcttcactatttgaaaacttaactacttcattaattactgaaaaagacggagaaattattgaacttaagagaggtaataatcatgaaaacatttaattggggaattattggtactggctggattgcacatgatatggctgatgctttgaacaaagtcaacggcgaaatttatgttgccgcaaatccaaatgaagaagcactccgtgcctttgtccaagaaaaacatgtacagcatgctttcactaatcctgatgaaatgattaaggatcctagcattgatatcatctatattgctaccccacacactttccactacgactacatcaaaaaggccctcaatgctggcaagcacgtcttttgcgaaaaggcaattaccgtcaatgcacagcaatttgatgaagtggctcaattagctaaagagaaacacctaatcttaatggaaggttttactctttatcacatgccaatctaccaaaagatgcaagatatgattaagaccggaaaatttggcgaaattaaaatgatccaaattaattttggctcactcaaggactatgatccgcagaatcgcttctttaataaggagctcgctggtggtgcattgctggatatcggcggctacgcaactgcttttgccattagtttcatggatgaatatcctgaaagtatcaataccacggtaaaattctttgaaactggtgttgacgaagaaagcggcattattttaaaaaattcgaaaggccaaatggcagtgatgtcattatcgatgcgggccaagcagcctaagcgcggactggtttcgggcaccaaaggttatttcgaaatcaatcaatatcctcgcggcactgaagctgatattacttacacccagagtgctcatgaggaaagctatgataaggttactgccggggatgctgatcaggcgcttgaatatgaagtcactgattttcaaaagtatattgaacaaggccatgacgaaggcgaattggaaaaatcgcggatgatcgctcacattttaaccagcattagaactgcctggggcatgacttatccatttgataacgaggaataattagttggatttcaaaagggatcgatacataacatcggtcccttttatttgcacttattgcttattttctgcgacatatttttctagtcgtttcaagccttctttgatctgatccatcgacgttgcgtaagacaaacgaatatatcctgctccacctttagcaaaaaatgagcccgcaattacagcaacatgcctcttttcagccaaatcataaataaacttggtatcatcttgttccaagcctgctggaattttggcaaaaatgtagaaggcacctttaggcttaacgcattcaaagcctaacttggttaatccttcataaagcacatcacgccgcttttggaattctttcttcattggttccgcatcgttcattccattgcctagtgcttcttcagctgcatcctgcattggcgttggttccgtcgttgtgattgcttggtgaatcttagccagttgatccaaaatcggcttaggcgcagctaccacaccgattctatagccagtcattgcccaagcttttgacacgccattcattaaaacaacttgatcatgtaaagtcttttccatcgaagcatgtggctgatcataattgagctcactataaatttcatcacaaagaacaaaaaccggcttatctcgaacaacatctgctaaggcatcaagttcatcttgtgaatacatcacacctgttggattggtaggataattcatgacaagcgccttaacgcgatcaccatacttgtccaatgctgcttgcaatttatccggcgttaatttgaagtcatcgtcagaagtgtcgatttgttcaaccgttgcacccatggatagggcatccccaatataaagcggaaaaattggtgttggcaccaaaacaacgtcgcctggattaagcgccgcagtcaaaaagtcgtagatcgactccgttaccccattggtgatcaaaatttcgcttgggtcgtatttttgtccatatttttcagctaaaaaatcggctgccgccttgcgcaaacctggagtcccgttagatggcgcatagtgtgaatggttattagcaatgctggcttcagccgcttttttaatatgctctggcgtgttaaagtcaggctcaccaatcgtgaatttgacgatgtccgaaatcttgttggtgtaagctgcaaaggccaaaatctgccctggcttttgttcaaccaagccttttttcatatgttttgttaagtcgaccatagtttttcctccttatatcgaactaaatcaattcaaatataggagtctttttaatctttgtcaaaggaaatattaattttgatatctaaagtgcacattaaatccaataattaacaaagcataaatactataaatagccgtaacagtcggatacattgcctgatactttatcagcaaaagaataattaaaactatcgccaaaacaatcgttaatattctaaaacgttgaaaatatgacaaaatcggtaaagccactgtcaaaactatatcagttattaagatagtaaaatccaccggatatgatttgatataaaaaaactgaaatattggcaatgcttctaacagtaagaagatataactaataatcccacatattaaaagcaactgattaagtatctttttatagtctttcattaaatcaagaacttctcttttttcatgtaccagtgcttaaccagagtggtcaatgcaatgtacaaggtcaaaagtacaagaactacgagaacataatattctgggatcggaccgaatttcattaccttagccaagcttggaatgtaaggcattgcagtaccgatcaatcctgcaccgatcgtagcgagcattactacgcctgaagagtgctgttgtaagaagggaattgctggatcacgcaatgcttggataaccatttcctgtgtccagagtgattcgatgaaccagccactccagaagatggccataaagacagccttttgccctggagtagcagccacataacttgtgcccacagtacttggacaaatccagaagtaaagcaaggcaaacgtaatgatatcaaagattgaagatgtcggaccaaagaagaacatgaacttaggcaacttctttgtctcccacttacgtggtacttccaagtatttttcaccaactctatcaaatggaagtgacaaacaagatgtcccgtagatcaagtctagaatcaacaattgcattggcagcattggcaagaatggcaagaatgatgatgccactaagattgacaaaatattaccaaagttagatgacaaggtaatcttgatatatttcatcgtgtttgcaaagatctgacgcccaattcttacaccatgttccaaagtacgtaaactcttgtgcagcaagataatgtccgcactcttttttgcaatatcaacagccgtatcaactgagattgctacatcggccttcttcatggctggcgtatcgttgataccgtctcccatgtaagcaaccgtgtgaccattttccttcaaaatctgaataattctagcctttgactctggtgaaagctttacaaagaggctacattcttcaaccatctttttaacttcatcgtcgctcttaccagcaaaatctttttcactataaatgtacttggtgttcaagcctactcttgaagcaacactcttagttacagcagcgttatcaccagtcaaaatcttaacggtaatatcgtcttgctttaacttcttaagcacgtccttaacatcatccttaggtggatcaaggaaggccaagaagccagttaagatcaaatctttttcatcgctaacattgaattcaccggcttgagcaggattgttcttgtaagctaacaaaacaactctcaaaccatctttgttcaaatcttcaatgtgctttaaaactttttctttgtaatcatcagttaaatcgttgatgtgactgccaacttgcacacgattgcagcaagcaagcatttcttcggcagcacccttagttaccaggatacgaccatcgccgtggcgcttgaccacgacactcatgcgacggcgcttgaagtcgaatggaatttcatcaaccttagtgtagtcgtgtttaatttcattaacatctagctcatcgctagcggcatcgatgatggcttggtccatcaaatcgtgcatccccgtttggaagtacgagttcaagtaagccaagcgcaaaacctgtggattttccttcatatccaagttgtagtgccgttccaatacaaccttgttttgggtcaaagtaccggttttatcagtacaaagcacgtcggcggcaccgaagttttggatggagttcatctttttaacgatggtgccgtgcttcgacatttctagcgaacccttaaccaaattactagtaacaataactggcaacatttctggagttaaaccaacggcagtagcgatggcaaacaacaaggcgttgagccagttacctttagttaaaccgttgatgaccaaaactaaaggtgcaatgatcgcggtcattgttaacaataatttagaaatgttcttgataccaacatcgaaattagtttccttaacgtcgttgttcgaaatatccttagccaaacgaccaaagacagtttgttcaccggtggctaaaacaacgccaacacctgaacctgacacaatagttgttccttgatagattacatcaggatagtccaaatattgatccatgtctttttgatcgggcctcttagtcgcaatcttttccacaggcgttgattcaccgttcaaagaacttgatgaacagaacaagtctttagttttgagcaatctaatatctgctggcaccatgtccccagcgtggatattaataatatcgccgacaactacttgcttggtagaaatttcttcatccttttgattgcgacgaatattggtagttacagacaccatatttaagagggcttcaactgcgtcattagttttcacattctggataaaggatgttaatccagaaataatgatcatcgcaatcataatgatcacagtactcaggtccttttgatctgccggcacgaagacgtagtcggtaaacagcgacaccgtcgctagcagcaacaggaccattgtaaaaggagtgaagaatgattcaatgaagaaatgcaatttcgtgttgtgcttcttggtagcaacttcgttaagaccattcttctccaaacgctctttagcttccgccgaagacagaccgtctagcgaactatgtagcgtctttaacgcttcttcgggagtttgcctagcgatctgcttaacaaactctgtatcggctgtcttcttattaatcagcaacttgttttttgccatgttaatcacactttctgattaaacacgcaaacaaactaaaaaggagccaataccaattagtattaactccttatctaagcgatgtttcctcgtcgttcagttttgacactacgtgacgtaagcacaggctagctatctggatctcgccttatctcgacaagaactattttactcgttggcatctctggatgtttccgggcgatagcttgtgttcacgtaggagcctcacctaacagtttatttgctttttcaattttcatttttattatatgcatattatttgacaatgcaattatctttactaaatcgttagaaattgtaaaagaatttaagaatgataaaaaacacgtgtttgtaatgaacacgtgtttttttataatttaattttgatatactattctatagacatggatatgttgcaactatttgtgtttagtagttttagcataactaaccacccctcacacattttgaaattacggcggtgagagttatgcataaacggatagtttggaggtttagtgctccgtggtagcttgggctattgcaatcagcatcgttctaggtgctttaggcaatttagctatcaatttggctatagcctatgcgataacaaaaaaagctaatcgcaaggattagctaaaccaacagttatctgaaactacgatcgaagtcaacggattgcggccgtgggcttcttttcatatacagattataacatgaattatccgaaacgaataaaaaagatcaggctcactgcctgaccttgctattgggttagctggattcgaaccagcgcatgatggtaccaaaaaccattgccttaccacttggctataacccaatcttcaaaccttttacttgattggttctatttgaatgacctctcgatcacccaacagatattagtataggggaatgaagaaaaaatatcaaggaaaaattcaaaaaaattttgattttttcacatttgctcgaaggatactgaatctttcttttatgaattataaaattaatttgtttttttacgattataacttttgtgacttcttaaccttattcattaattcaaagtcgttggtaaaaattccagctacaccaagtttaaagtacctttttgctatgcttactttatctactgtccaaattctttgcgtaactttgctaggtaaataccaatgcggatggatcgctgcaaaatgattcttagccgcaaactgttcaggaaacggcaccggccatttgtttaaaaagcaatattgttggtggggatcaattcgctggcaattttttaaggtttgataattgaaggaagagaaaataatgggatgcacaaaatgatattcttgtgctaacgccaaaacgatggcttcaatcccctcatcatgaatcttgttagtcttaaattccaagttaacatacaaatcctgtccctgaagaatttcaaataattcacttaacatcggtaccggttcaccgttagctaaacgaaatcgcctgatttcacttaaggtatagtccttaatataacctgtcccattagtagttctatctaacgtttcatcatgcattactaccggcactttatctttagttaagtgcacatcaaattcgacaccttcagcgccatgcgttgctgcatatttaaatccttgcaaagaattttccgcaaatttgaccggtaagccccggtgagcaaaaataattgtctgagtcattttttcacctacaaaaaaatgccgctctcgcggcatctgctctattttaatctaagacgattgcaccttgagttgccaaagtatcacgaactagattcttaacatctcttctaactaccataccatcggtgttctcaacgtattcaagatattgagctgacttaatatgtgcatcataagccttgtcatcaaagtaaacttcgacaaaataccattcgttttcgttcttcttattgactccagacatcataatttccatgcctggttcagcagccatgctagtcgtcatttctttcttaacttcatgcgcaaacttttctgcatcttctggtttaacttcaactttaactaagcgcattacaaaatgatctgcgttatcattcaaagcatcatgagcctttgtggtaataacttcgggctttaattcgattacttctttgtctgtggaaatcttgtcgatggtttctgcaaaatcatcagcatgtgctgctgcaatgtgcaaaatcttctgccaagctattccggaacaattcgatttcgtaattgtcttcaccatgagcatcgtcatgtgcgcttccaattaacaaagttccttcttcagctggaattgagttgtgcatgttattttcaacttcacggatatattcaccgcgatcgttttccttgatatttaatttagtaattctaaaaattggtgtttcatccatttttcttgcctcgtactataatctttccacacctatcattataaactaatgcagaaaaataaaagcccctattcaccagttatttgatcaattttaaccgctttagctggccattcagtccgtacatattccaatgtactgccttcattgctagttaactgcacaaaagaacaattgggcagacctaaaaattcacgatggttagttttttcattaatgtattgcgacaaactatcgccatgaccaacaactaaaatattatcgccatcttgtgcatcccgcatgatcaagttaatcccgcgctccattcgctcaactacctcatgattatcttccacgcgaaatttgcccaaacgatgcagcggccaaagtagcacattgcgtgcctcaaaagcgccatagcttttctcttttaattcctttaatcgaacatactccatctcaggcccagcaataatctctaaagtatcacttgccctttcttggggtgagcaatatgctctagcaaaattaattccctgatcttgaaaataatcccgcacggcttccgcctgcttaatgcctaatggtgttagcgctgaatcacagcttccctgcatgcggtgtcctttattaaaccaagtttgaccatgtctgactaaatataaattaattgccatttcgtcttactttaaaccctctgctggccacacgtatgaatcaaaatggatctttttaccatcaactgttagcttcacgattgaagcattgccaaaaccgccaaagttcttattctcggtagcatcgcgcacaaacttagctaaaatatcaccatgtcctacaactaaagcagtttgaccatcctctaagccgcttaaaatctcgactaccgcacggtgcattctagcaacaacgtcttcgtctttttccatagttgggtctacgttaggattattataattccaaggcaataagaactcatcacgaccttcaaaaatgccataacatttttctcgcaggtcttttaaacgcgtataaggcatttgatgatcagtaataatttccaaagtatcgcaagcacgctcttgggttgatgaaaaagctttgtcaaaatgaataccctgctttttaaaataatcacgggccatttcaacctggcggatgcctctttcattcaatggtgaatcacaacgtccctgaactttatggtaatagttaaaataagtttgtccatggcggactaaatataaagtttttgtcatattttcctcgctaaatcgttttttcctttatcttatcaaaaaagcacgcgtcgtgcgtgctttcatattttttcgttaaattttgaagttcttgttgtattcactcgaatttacaacaaaacttggcacactaatgaagtgcattgagtaaatattgccagtcttggaaatgctaaagccataataattgtagtccccatcatgacgtgagccctgtgtattaaataaatcaccggcatgttcccattcgcggtaaaggctcttatcattacgctgattttccccagctcctgcaaagccaaagatcatttgcttcaagccaaagtaaatatttcgcttcatttcagccatagacataatcttcttattagtagaaaaaccagccatatcttcgacataattatcgtttaattctaagccatgtttcttgcaagcccgtacaattccggcaacatagtgatcgccatctttgatactcttgccattttgctcgtattcttgcgcaattgaattagctaaggactctactccagaactataaacccacggcttcaaacctaattgactacgagcactattaattaggcacaaagagaattctgccagttctttttgctcactagcagaaagatcggcaagattgatcattttttgatcggctttgctttcacctgagctaacacgtgaaaagtcgttttgctccattcctttcatgcaagcctgaataaaactagcacttggcttccccttatatgcttgcaataaactagctttcgtatagccactcggcatcttcattgtagctgttacataattctgcgttgcagcagtctttttaacgagtttggcatttttagctaataaccattgagagttatttccaatcttataagccaaatattttttcttgcccagctttaaatactttttagcagaataagaatactctcttttagctacagcataatacttagacttcttgcccttatttgtataaagtctaactttcttagttcctttaacctgaacttttcccttaactgctgcttgaaccgtttgtggtgtcgtttcgtgtattacactagccgtccccatcaggcaaacactagtcaacaaagtcacaattaatttttgcttcatagctgttccactttctgtatgttttgattattaatatttgttatttaaattatatcgtatttatttaattaaaaaaatcaaaaagagacacactatcattttgacagcatgcctcctttaagttagtttgattttatttagttttgaaaagaggtttatttttagtaccagccgtttgcttgccagaatgccttagcagcagtccatgagccataacgacctttgacatagttatcagctactcgctcttggttagctgctgaatagtcaccattcaagtatgaagctgaaagttggtatttaccaacgtattgaccatttgaagcaccgtatgagccaccagattctctaccggcaatccattccttagcactagcttctgaaccacttacagttgaagtagtagtttgagtgttggtgttatttgctgcagtagtagttgctgcagaattagtattttcagtttgagtttggtgttgtactggagcttgggttacagcagcttgagtgtggtagccgcgagttacatacttagcacgaacccattggttcttgcctaagtcataccacttgtgacctttggcatcgtaagcagtcttaattactttccatgaggtgttgcttgccaaagtttggccagtagcctctggattcttgtagctgttgtaaacagtgattgcgttgtctgaaacgttcttaactgttacaacagctgtatcgttttctacaatagcagcttgagcagtattagtgttgttattagctgctactaaacctgtaactgataaagcagttactgcaattgacttaactaagatagatttaattttcaaaaaaattctctccttaaaattttaaaagtcataagtaacgaattttcaccttattcgtccgtcccattcaattgacacagcatatactaccttgcttaaattgcagaactataacaggaatatcacctgcagattaagaaactattgcaaagtatgtcaaaattgtaacaattgtaatatttatgtaaatttattcagatgatacaaaaccgcatcagatcgccatttaactcgatttttaatttttatttgctatgtgcaaaagcttgttcgcatttaatatattgaaatacttttgcaaaacgaaaaaagaaagagtttctgatacattccctgtcaagtagacagtagaattacataaagcttttattcctcagttgattaataatcagctgaggattttttggcttctcttattttcttttcgtgtattttttgccagtatttctcaattcgatgatttggtgcaatagggcaattcttaatattgcctttcatcgcttctttgcgcatttcaccagcagttaaaccgttaaaacgtttctgtggatcttcattaatgtagtaatctattgtcttacaaatagaatcattaagttcatcataactggccacttgaggatgaagaataactcgcatttctttgataatgccttgccagccttccattggaccattatcaatacagcagccaacacgagacattgattgcgtcatgccttggtcttctaattggttttggaaaggtgcgcgagtaaattgaaaaccacgatcactatggaaaagcggatgagcattagggtatgctttaacagcctgcttataggctgcttgaactaaagcagtatcgtttcgtttactaattgcgtagccaacaggatagcgatcatatagatcaaacacagtacatagatatgccttaggcaggttagcagcaacgacttcagtgatatctgtacaccatttttcattaggtctagatgcattaaagtctctttttaacttgttttcggccgttttctcaggcgttgtatgcttgaactttagcttctggtatctaggcttttgtgatctaatgccattgatacacatcaagcggtaaacagttttatgataaaccggcttttcatcagacatctgtcgattaactgccatggtcatcttttccgtcccaaacagactgttgttagacttggttatttcaatgatctttgcttcaatctttttgtctcgttcttcacgcttactcggcttgcgcttaggatcaaagtatttgtaataagctgagcgtgctattttagcccatttgcacattaaatcaatcttccaattgtacttttgatggcagtcatggattaactgatatgtttcttgtttccagcgtctttttattgcggcttgtctgtatcttggttgtccggcaagcacatcctttctaactgatctaatttttttaggaattcgttcttagtttgttcttctttgagctgacgctctaattccttaatttttcgattagccagttctaactcagttagctcttctggcttcttatgtctgcctcgtttatctgttaatcctgtttcaccattagctagatatttgtgtgtccagctgtaaacctgctggtaagaacaatcaaatttgacagctgtttgagtgtaattcttgtcgtgattaagacagtattgaacaatctgaattctttcttgctgggtagtttttcttcttgctttagtcatatagacctccggatggggatcatagtcccgattttctatatgactattatacttggaaacccattctgatactgttccattgcttctaatgccatatttattagctaaagaaggtaacgacattttgccagctaaatattcttgaacaaccttttctttaaatgccttagagtaatgattattgtattgagcattacttagaagggtatcacgattgctttgatattgatgaacccatcttcttacttgcatcgctccacttttacttggcatcttaagccgtttagctatttcaacgctgctcctattaccattcaagtattgttcaactgcccatatcttttgatcgaatgaatatttactttttctggacataaaaaatcccacctccatggataattgaatactttatgtatttaaatcgtccactttagtgggattgtatcattcctctttcttttttaattctcacaaattttttattaatttattccattattctgccttatcctcttctataagttgacgtttattaagtgccgcaataaatggcaggtaaatcaaaatgtctaagataatattgattacttgcaaaattgagcccgcaatactgcctgttgccaaaaaaactgaaataattggcggcattgtccaaggaattacagtcccattacataatagaactaagcctaggttcattgcacaataagtggtaatcgcatttaacattggcgcaatcataaatggaataattaacaacaagttcattacaactggcagaccaaacatagttggttcattaatattgaacaagccaggtacgatggtcagtggtgctaaaactttattttgtttacttgcgcgcttgcgccatactaaatatccaatgcaaagcactaacccaatagtggcacctccatcacccatgtaaacaaagttatcgataaatggttgcgtaacgatatgaccaccatgagctaaatctaagttacctgcttgattcaatacacggttagcatcggtttgcatcaaccagattggttgcatagcagtattaactacgttaccaacatgaataccaacgaactagaacaagctcaataaaataattgaaactaatgtaccaattaaggtatcgcctaatgcacctagtggcttagccaaaatattcatgattacatcgtgaatattgccccatccaatccaagcaaaaagccagtaaacacagccagcaatagcaattacagcggcacctggaattaaagctgaaaagctcttagctacagcaggtggcacagtagctggcattttaatttggatattatgattaataaaccattggaaaatccatgcacttaggagaccaaagataatagctacaaataatcctctactacctaagtaagtgtaagggaagccttcaactggaactttatctccactcataatacttggcgtcaaaatgaagaatacagctgcagaaacaattccggcagaaacaccatctgtcttatattgattagcataactccaagcaattccaaaagctgcaattaagaccatgatcccaaaggagccattagtaatcttggctaaaatctgtgccaggcttataccatgaacagcagtttttgatagccaatcagaccaaccggcaactggaaatgaattaatgatcatgaataatgatcctacaataattaacggtatagccatggcgataccgtcacgaacagcaattaaaggtttaaaactgcctattttagcggctacaggcataatgtgtttgttaacaaacgcattcaaacctccgctcgatttactattagccataataattccctcttcaatctaaaaatgatctcgtgtttctttggtatatacctttcgcaatataacaatatcctgaaagcgattttattaccactattttaaaagataattttttgcttcccggatttaaaattgaagtgcaacactaagtgttaaacaaaaaggccatgaagacctaaacttgaagtgacgaaaaatcaagaaaggaagatctttatgaccaattcaaattctagcatttctaagcactatcatcaattaaccagcgtacaacgtggacaaattcaagcaatgctggattccggcataacttcccgtactgttatcgctcaagaagtcggctgccataagtcgacaatcagtcgcgaaatcaaacgcggaagtgtcctgcaaagagacagcagctatttattgtatgagcactattacgctgatactgcacagatttattatgagaagcgtcgcaaaaactgctatcagcgcaatccattgaagcattatgctgtctttttgagaatgctctccagacgctttaaagctaaatttgatgccaccagcatcgatgagttcgttggtgaattcaaaaggactatgccaggctacccttgtcccagcacaccaaccgtctatcgctatattgatcagggcttgctggacataagcaatattgatctgcctatgaagctcaaaagacgcaggaacaagcgtcatcacagccatggcggtcacgctttgcacaagaagcatcttggcaattccattgaacagcgtcctaaagagattgaagacagaaaagctccgctgcactgggaaggagatctggttaaaggcgtcagacgcaagaatcagcctgctttaatgactttgactgaaagaaccacacgctttgaagtagttatcaagattcctgactatcgggcaagcacatgccaaaggctgcttcaaaaggagattgacagacatcctgcctggtttaaatcaatcacgtttgacaatggctctgagtttgcggatatgaccaagatcaagggctgccagatttactttgctcacccatattctccatgggaaaggggcaccaatgagaactgcaatggtcttttgcgtcaattcttccctaagggcaagagcatgaaagacaagtcaaaagcttatgttcaacaggcaactgatgccattaaccacaaatatcgccgaatcctccaatatcacacagcagaggaactcttcaagcaatatatctcttcataacctaactgttgcacttaatttgacaattcaggtaattttttgcttatatttttaaccaaagtttgattaacaaaatattgcagttatggctgtaagtgctatagtttacatgtaatcataaaaaaagcgaggaaataaaattatggctaaatacgaagtaaagttaagcgaagaagatttacaaatgatcaaagattgtcattcaaagaacccttcaatcatgaaggctatgaacgaagccaagaaagtcgaagattaagcaaattttgatctctaaatcgaaaaaaggcgtccgcaagggatgccttttttattggttttcaaatcttgtaccgtggggatgcttccagttataaacacggactattttacccatgccatctagcactacaacatttccatcattatgtggataaatcaatggatcagaatgtgaaccaccgtcagtaaaaattcttgctggctcacctgggtattgcactgttctaactatacaatcatcaattgatagccgcctcatttgtcgaccatcatcatattttccttctaaagcagctgttggcgtatgaccagtcacaattgttttgcccgttttgttatgagccatcattttcaataaggaatcggaataccaatacttatctcgtgcccaaatacggtaaaaatcatagtcaaatttcaagccatactctatctcagagtaagtttccggatcattatactgttcatctggccgcacacccgcatgaacaaaaatcaagtgtggcgtttcatacataataggacagccttttagaaagcgataatactcactatcacgcaactcatcaggcaaaactgtactgccaaacagactaactaggctcttgccaccaccgttataaacccaaatgccatcttgatgttcctgcttctccgcaaaattgagtaacatttgctcatgattacccagtagtacgattgctccttcgcttttttgctcaattaaataatccaatacttccttcacatgctcgcggccatcaacatagtcaccgcccgcaactaattgtgcttctggaaaatctgctgttgcctgcttgattaagtctaaggtttctaagttgccatgaatatcagaaatgaagatatagttctccttcactcgatcatccaacagcgttcgattgataatttttttcatttcatactaccccatgtgctaaattaaactaacatttttttcttaattatagcagatgtacactggttctttttctatgcaatcctaaaattaacctccggcaaaaaaaaggctacaatagatatgaaaagaagtgattgcaatgtttaatgaagaaaatgcaattgatgccaaggacttacacgttgattctttcaaatatcaatcaactgaagacatgccatctgatgcttattctagctgggaagaaaaacacccaaacgccagggtattcaagcttgaatttcgcaacatcggcgaaagcaatgaatggcaggaaatgatcattatctacactgaataaataaaaagtggaagaactccaagcctagtgtgtttcttccacctttttacttattttgattttctttttccttcaatttgtgcagaatccgttcattttctttagtacgtttttcaactgcggcatcgatgatcgaatcaaaccaatgattatcagaatcatcgcttgtttgatccttcttttgaggaccttcattttttacacgtttgtcagtttcttcattaataatggaatccagccaatcaaaattatctggatcatggctcttatcagtcatttatttttcctccatttttgatttaaattaatttatttacttattctttttgactataattgagttaacaagatgaaacaagaaagaagtgttcgaaatgaaaattacattcactgacaaggcgcttgactacttaaaaagacgcgaaatcttgaataaaattctaattttaatcgccgacgatggtggtggtaaatattctatcaaaggcggcggttgtgcaattggcagtcacttttccattatttatgtagacaaagttgatcctgattatccaatcaagcttgaaaacgaccaaggaatcaatatttacacttctaaatacgacaccacaatgatgggaccaaatttagtggttgactacgccaatgcatccctcaacttaaagagtgacgaaggattgcttgatggcggcgttgatatcggcaatggcgccgagttaattaaagctcaaaagaatgtaaaaatgaccggcgttgaatggcgttgctagattaagatgatcagaaaagacagtagtttgaaatcaactactgtcttttttctatagaaattgaccactattaggatcgaatccagtacgatctgccgcggtaatctttctaattaccttgcatggattccccgctgcaattacattatctgggatgtcattcacaactacactgcctgcaccaataattgaattacgtccaataattgtatctggagttacgctaacccctgcacctagccagacattgtcaccaatgccgatcgaatgtgcaacacaaccaccggcttttcgctcggctggatcaaataaatggttgctggtatacaagccaaccttaggaccaaacaaaacattgtttccaatataaacaggcgcgccatctaaaatcgtgcaatcatagttggcataaaagttatccccaacatgaatattttgtccaaattcacaacgaaaattagggttcacgaagggatgctcacctgttgaaccaaagagttctttgattaatatttcttttttagcgtgatcattctcattattaatattattggtcttcaaggtagcaaggtctctcaaggtgccaaggcgaggatccgcatcattataaggacgaccagtagccatgtaattaaattttgttctaagcgacatgattctttcctttcattagttcttctatttttattatagaaaagaaaaagcgctttcgcatgtttgacgcataatatttagcacactagccctaatcttattgcttattctataatggtaaaaaagaaaggattaaagccatgaaaaacttcaacaaatttaccgctaaatctgcttgccttttacagaatctactagtagtctcaattggtttactcgggattattctgatcatactcttattccgcgatctaattccactttgccaatcattattttcaactaagatcgaagaaagcaactccgagattatgtcagaaattatcgttttcttactcttctttgaatttactgcaatgattatttcagccttgcgtcatcacggtcacactagcatcaattttctattgggcttaggtgttactgcgctaattcgcagtctgattacttctcatagtaacatttggagtacgcttgccacttctgcttcaattttagtactagtaatcgcaatggttattttcaataaaaatctgcgtaatatgtaaaaaaactgtatcactctaggctaatgtcattggagtgatacagttttttgttttactaattaactttgcgccatgaactcattaagttgtttcttagaaaaaacattgccatatttgcatactacgtttcctttcattattgaacgtaattcacacaaccaaaaaagcatcatttattaacaatattgaaaataaataatgctttttagtaatactctgatgctgaatgccagagtcgaactggcgaccttctctttacgagggagatgctctaccaactgagctaattcagcaaactcacaacacatgaattataccaaatgtcgctaattggcgcaacgacctttttctaagctagcattcaaaaaagaacattatttccaatctaagcacaatccttgcttgtgcaattcttctggcaattgatcacgatcagtttcatgcagatcaagttttttacctgtaatctgcttagtgaatgaatcaatgcgacggttagaatcacgtaagtcataatatgtcgtaactatatcatcatagtctttaaggtctttcacatcaaagtctttcttataactaccttcaaaacaagtgaacttaagtggtaatcgtggttttaattgtggcttttgatctggcataccgacttgcatccccaacactggaaaagtcaactcaggcaaatcaagcgtcttaagcaaatccaacggatgatcgttaaccgtaccaagtggcacatagcctaagcccatactttctaccgcattagcgacattttgaaaagcaagcagcgtatcttctattgcttggaaaaagatatcagttgtgtgaacacggccgtcgtctttgtcaagttgctttctaatttgttggttacggtacaagtcaacgataaaaataaacaaatcgccttctgcaccaacatatttttggttacataacttttgaattttcttcttttcttcaggatcggtaacgtgcagtaagctagcattttgcataaacatgctggttggagtttgaccaaagacagaatacaaagtttccagttgttctttagtcaaagtttgatccttaaattttctaatagaacggtgatttaattgcgtgtcgattgtttcgttatgtatcattttcatccttcttactaataatcagtaagttcattataacaaataatatggctacttttcttcaaattcaattccgtaatctgcttgctctccgtgctcagctaaatcaagccccattaattcatcttcttttgatactctaattggaataatccttttaagtaataaaacgattatcgtcgtcatgatccctacaaatatgatagtaaataaagttcctaaaatctgagctgtaatcaaatgcaacccgccaccataaagcaagccattttcaatttgcgggttaacaatcttagtcgcaaataatcctgtcaaaatcgaacctacaattcctgaaacgccgtgacagccaaatacatcaagtggatcatctagcttcaattttggcttaatcacatgaatgaagccgtaactggctagtgtacaaataaaaccaatggcaaaggctcctgccacagtaacatagccagctgctggcgtaataccgactaatccacacaaggcacccgtacagaggccaatcatagtagtcttttctttaataaacatatccaaaaacatccaaaccacaaatgacgtaccagttgcaacagttgtagttaaaaacgcttgtgtagctacatcgcttacagttaaggcagaaccaacgttgaagccataccaaccgatccataatatactggttcccattaaaacccatggtaagttataatgcttaacctcaccatttggatcaaaatcaattcttggaccaacaaaaattgataaaaacaaggcggtaataccggcggtaatatgaactacagtcccacctgcaaaatcaagcatccccgttttggctagaattccatctggtgtccaaaccatatgaaccattgggtaataaatcaagatcgaccaaattgcgacaaatgcaagtaaaaatttaaatttcattcttccgaccaccgcaccaacaaacaacgccggcgtaataatcgagaacatcatctgaaacattaaataggtcaaaattgtgatgcctgaatccttggaataaagcgtctttaaatcaaagccgtttaaaaagacacttttactcaaaccaaatattccaccaacatccttacccaaagccaagttataaccaaaagcaataaacaaaacgattgcgacacctgtaatcatgaatactgaaatcatcgtattcacagcattcttctttgaaaccatgccaccatagaaaaaagcaagtccaggtgtcataaagaaaactaaaacactagcgacaaaaacaaatagagtgttcgtttgattaatcatctttttttctcctcaaagtaaaatagttagtcctaatattttaaattggtatatacactatttcattgatgttgcagcatatatgcttaattaaaaaatattggtttgataaaatttaattctcattatacactcatttttcttcttgtcattaattttctataaaaaataaaggtgcatagacgtatggcttctatgcacctttgcatatatttgcttttaattatttgttttcgttttcaagattgttgattgcagtttcaaccaatgcatatgcttgttgagcttggttcttagcttgaacatattcgttcaagttgtcatcaccattagtaagcacacgtgcaaatgaaatttgttcagccatcaagaagttgaacaatgaatcccacttcttgtcttcaaacttgatttccttagcagaaattctaggcatcatttcacgtgtggtattaaatgccttttccaaaatttgttcatctgcatcggttaattcacgcacattgtatgcttggtggatttggtgaacctttaaaagttcttttaataaagttcttgcttgtgcatcttttgaaactgattggttaatttttaaagccatttttacctactcttttcttttttattaacaattataccaaattgtcttcgaccatttgcttaacgcagcgtttcatttctttaatatcaagaatactgtaggcaaattcttttctaagtagttcctttggcaaatattgatcgtacttgtcgattcctggcacttcgtttggataaaccagatcaagcggatcaaagtctttatcagcttcttcgcctaaaatgcgccagaagtcatgctcatcagcatccatggcaaaatacatgaagtatggtctagatgaattaaagccacggatatttaactttttaccgcacttaattcgaattaatcgctctagtgccaaaaatgcataagtcccagtccatggaaaaagacaccacatattaccgcccagcttgatcaaattattctttggcagaccagctaaagcggcggtgtctctagcttgcgtcaagcgagctttaccattttgcatcaaatatggatacatcatcttttctgcaagtacctttttcattctctgtaaaattttaggttgaatatctccaggtacatctccaaagtaggcaggaattctaccctttacttcatggcaatatacttgatgacgcttgatatccacgtcttcgacaacccatacacgtccagcaatcgcaatcttgtctcctacaggaggtggcttaacgatcgtacctaattcttcgctgccagcgtgaacactgaattcctcgttttcttggaaaactgcgtaaaatttaaagttattcacaactcgttcaccagcaagaccaacgatcagaccaccatcttcagtccactcaatgtgacctgttttaagcaagtgtttgagcaaaacgcgataatcgtcttggctcacgttgtggaaatatgacaaagttaacacccgtgaagcaagttcagctggcgtcatttcaccgcttgaagccagcgtactcatcgtctgatgatagagcaaactatatggcaaacggttaggttcaggtggctccacccatttttcttccgcatacagttgtaccaaggcaatcccttgaagtagcggccacggaatcagttctggcaacatcgctcttgattcagggtgttcttcgcgcatgacaaagtgcatctctggtggattaccgcggcgccctgtccggcccattctttgtaaaaagccagacacagtaaatggcgcgtcaatctgaaaagcagattctagtttgccaatatcaattccaagttccagcgtagctgttgcacaagtcgtcatgtagacatcgtcatctttcattgcggcttctgcagtttcacgcaaggctggagacaaattaccatggtgaataatgaagcggtctggctcatgattataggcacaatatgctctgagctcctgacaaacagcttcacattcttcacgactattggtaaaaacaagacactttttaccacgagtatgctcaaaaatatagccaattcctgggtcagctaattctggtgccttatcagttttcggttcgatttggctcggatcaaagtccctggaacttgcttgtggatttgttttataaaaatgttccatagataaatgccaaatctgtggttcattttgtacccttggtgtaacagtttttctgtttgaaccagcacccaaaaacttgctggcatcttctaaattaccaatagtagccgaaaggcctattctccgtggatttacattagctagttttgataaacgctcaattaaacaaaatgtttgtccaccacgatcacttctaagaaatgaatgaagttcatcaaccacaatatattttagaccaccaaaaagatgcggaatatccatgtgcttattgatcataaagctttcaagcgattccggcgtaatctgcaaaatacctgaaggatgcttgagtaacttgcgcttttgtgtttgagctacatccccatgccagcgccaaactggaatatccacatctgtgcataagtctatcagacgatcgtattggtcgttgatcaaagccttaagtggcgcaatatacagaacttttactgaatcttctggctcattataaatttccgacaagatcgggaaaaaggctgcttcagttttgcctgacgcagtcgaagccgacaatagcacattatgatcggtgttaaaaatttcttcggccgccgcaacctgaattggtcttaaacttttccagccatgttcatagatataatcttgaataaatggcgcataatgtgaaaaaacgtccatagtccatttccttaaatcttaaattcggtataatccttttccacattatccgaaacagcctctgacttggtatagctgaattgatccgagttaagcagatcagtgatctttctatcaggattctgccaaacaatgtcgagcagctcaataaagtcacgaataatttcacgtggcgtgatattggtatccgctccaacacgggcatattcaatcttaataaattgagccaaatcatcatcagtaatcgtgcgctcataaccgtacaaattggcatgcatgtcagctagtttttcagtcaaaaccaacatttcttcagcggttaatggttcaagcttaattactggcgcatacatatcacgtgctccttcttgagcgaatttgcctgaagcaagtcggctgcgtaaagcttcgtatgaataaactccgcgacgacggtctttaactgcttgtggcgtaccacacataataatgcctaagtaccttgctttgccctgcaaggtatcgttgtacatggtcaaaatcttttcatagttgtactggcggctaattgtattcggaattttataaatattaaccaattcatcaatcataatcattaaaccagcatagcccgcttgtctaaagaaagtcgcaaataactttaaatattcataccagtcactatcaccaataatgatatcaacgcctaattcctttttagcctcagtcttatggctatattctcctctgaaccacttgactactttagccttagtctcatcatcaccactcatataagcgtgatagtacatgttcagcaatttagcaaaatcaaaaccatgaactaattcgtttaatgaagaaatgacgccatagattttttggtcaactgcttgctcaaatttaggatcatcattatttaagcctgtttcttgcgaaacttgcatctgcactgaattaatccagcgatctagaatcaaagtcaaggcaccaccttcaggcctagtcttagttgataagttctgaattaattcacggtatgttgctaaaccctgtccttttgatccttgcagccgacgttcaggtgataaatcaccatctacaacaacaaaatttttatccatcacatagttacggatcgtttgaagtaaaaaactttttcctgagccataacgacccacgataaaacgaaagcttgctccgccttcttgaataacatccacatcgtgtaatagggcctcaatctcggcctttctccccacggtaatataaggtaaccctattcttggcactaccccaccctttaatgaattaaggacagtttgcgcaattctttttggtactcttcttttttgtggcatgatttcatcccttcaaaaacatatcttttaagtcatctacataatcggtaattacttgtggttggtcctgttcgttattttctaaaaccacatcaccgaattcatcaaataatttttcattaatattatccatcaaaattgatgccattaaatggtgctgcttcaaataggtctgccaaggctgctgcatcagcaatgcagttaagaaaaacatttcattttcatctaagccataatcattatcaactttgacagtttcatctgcttgtttttctacttcttcttgtgcttctgcctgctctagctgcttttcctcatccgttaacaaactatcacgcgtcttcgaagcattggcccgaatttgatccaaatcggaaaaatcaatcttaatctgatcaatctgcgcctttttttcttgaatgcgatattcagcaatccccgcgttaattgccttaagtacagcttgatcaataaatcgcggcttaatcgaccgacctagtttaaattctgttcgcgccactctatctaattcatggagaaaattatttaaattaacccgctgacggctgatttgttgatcacaatgaatttgccattttccttggtaaaaatgatactttcttactgcatcaatctgatggtcagctacttgttgttttcgcagataaaaaacactgcctacaaagattggcttttcaattatatcaggcttgcccacaaacgcactgtaatacgcaatgccgtattttttagcatccagcagctccagccacacgtaacgcaacagttgaacaaataacttttcattcttattaataactttagatgaattccaataagtcgttttctttgcaaagactgctgctaactcttgcgcagtaaatttttctggatggtgtaaaacctcataatcatgatcacgcttaatctcagatgcaaagcgctgcttaataatcttttcgtctaaatcataataaagaacataatctttgagccagtcttgtaaatatacatcaatactaatgtcaaattgtcgcacatatttttcttcaaattctaacagcttttcatatccatcttgtgcgtcatcaacaccaatattgttcagtaattcataaatataaacaaaggcataagatgtactcgttttttcaaaaacatgctggcgaatcttgctgcgccaagtaaagtaacttctaagctgcccagtattcatatcatgataagttggataaaaacgcttaaaggcaaaaaattcaggataatcatcatcatagtcggccatcatcctagcctgttgataaaaattcttagctcggccacgactgggcaaaatactgtagtcataaacttctagcatctttctaattctatctggaaccagactattgttatgcttcttgcgaagattttcacttggtttaattgcttgggcttgatagcggtcatctactttatctggtgcaatataaaaatattgattctgggcgatatttacttcatcaccattcatcgccagtttaaaagcaaaatcaagtgcttttttgagtgaatcttcactaactttttctaatattgtcccaacccaatctgccgccttgatcttcattggatcagtgaagccaggcaaatctcttattagtgcagccattgcaccacatttcaggtccaatatactctgaccttgcccacgtgataatatcgcaaaataaccactatcaactggtgacattaaaacgtaaacgctagtggaacctggtacagcaggcttaaatttcaaaccatatttggcatagacatatttgaagagttgatttgaatccattttgtctccttttttcgcacgtacgttcattatatcatcgatttattttttaccaaagtcacgcatgtcagctcctcatgtatatttttaagtttcataaagtttatatttttatatttgtgtggttattaacaaacaattatgttactatagtttatgtaagttattgaaagcgtttttataaaagcttcctagagaggacaaaaacttaatatgagtacaaaagaatgttattctcaagatgaattaagaaaagataatccaatgtttagccgcactcgtgccactattgaaagtgcattttacggcaacaatgtccacgaagtaaccagtgttgcagaagcttataacttagctaagaagcaatcaggcgttattgttactgacttgccaatcttacacactaaggaattaggtttgccacatggcgcaacccaattggtttacaaccacggcaagattttaggtagaactgctagcgcccgtcactttgttgacaatcctaatgaagatgctgaagcattggacggcaacctacgtgaagatatttacaagggtcatgaacaaaagtacttaaaggctactgttttagtaggtcttgacccatcattcactgttaaggctcacattatgatgccagaagatcaagccttcaaccttctttcatacatcctcaacttccacttcttcgacgatgaagctgaaaaattatacgaaaagtcaaagttctacgatgaaccagacatttacttctacttcgatccaaatgttcaagacgaagattaccctaagggcttaggcgtatttgacgctccacataactgtgctgctgtcttcaaccttcgctacttcggtgaacttaagaagggtactttaaccttagcttgggctattgctcaccgtcacggctacactgcatgtcacggtggtgaaaagtcattccactttgacgataaggacgacaagacctttgccttctacggcttatcaggttcaggtaaatcaactttgactcatgaaatgtacgatggcaagtatgacattactgttttgcacgatgatgctttcattatttcacgtgaagatggttcttcagtagccttagagccttcatactttgacaagactcacgactacccagcaggccaccacgagactaagtactacaccactattatgaactgtgatgtaaccttagacaaagacggcaagaaagttatcgtaaccgaagacttacgtaacaacaacggtcgtgttatcaagacccgctacactagtcctcaccgtgtagactttgaaaagtcaccaattactgcattgttctggattatgaaggacggttcattacctccaatcatcaagatcgatgacccagtattggcaactactatgggttgtactttagcaaccaagcgtacttcggctgaaaacttacctaagggctttgacatgaatactttggttattgaaccattcgcagacccattcagagcttacccagtttcaggtgactacagagacttcaaggaattgttcactaagcgtggtgctagttgctacagcttgaacaccgacgcatttatgggtaaagacattcctaaggaagttactaagaagttaattgaagacttagctaacggcaatatcaaagacagtgacttcaagccattcggtaacttcaagggtgtatcatacttacctattgatggttatgaagttcaccttgaggacccagaataccaaaagaccttagctaagagaatgcaagatcgtttgaactggctcaacaagtacgatgaagaacacccagaaactccaattcaagatgaagctaagaagaccttggaagctatcatcaaggaattgatctaatattaaggaaataaattagtgtctcattcaattaaaatttaatttcttaatgacgaaaagacgagagttgaaattcagctcccgtcttttttattgctcaatgtaattttgcttctgtagtttggcatctatcagtttataaacttgcactttattctcttgtgcaagttgtggattatagttatgtgctatttcaatgacaatagccggcaattggtagattatcttatgaatggcatcactatttttagggtctaaacttgaacaaatctcatcaagcaaatatatcttcttagaacgaattagacctctaactaaagcaagtcgttgtgcctgaccacctgataaattgttcgcgtcatctgaaattaatttatctaaaaaatcattgccaaactcatgaatcagtcccatcttttttgcttcatgaagcattagatcatcaggtatgttttgcagaagtgatagattctccctcactgtaccttggaataaccagattctttgcgagatcttgatgaaatcggcaggattaatttgatgaccagcaaaggtgatttcaccgttatacttcagattattagcaatacaattaattaatgtacttttcccaatgcctgaagccccagtaacaatgatcttgtcatgatcacgcaaagttaaatttataccatctaaaattttcttatcaccatatgaaaaagacaaatcttttattttcaaaatagcttgagagtcatgattatcttgtttaacactttcactttcttcaaaattatagctttttatttttctaattgcatcggtgctatgaatttgagtctgatacaaagcaattgttcttagatatcccacaaccctatcagctgacaaacttaaagttataatggccgctaccgttacgttaaaccagcctctctgcataaaaagcaagccaataaaaattggtagcaatagtgtaactaaagagattaaccatgcaatgaattgtacctggaattgacaattattcatcttacgatatttgtcttcctcattaaccaagattcgatcaaatcgtttaaagaaaagatgtctgacaccaaaattcagtatttctaagcgtccttcaaatatatccttcattgcctgaatcaactgtgagttagatttattccatttttcggttttctcattcatcctcttcttgccaatatagcttggaatcagggttagcgctgaaagaagcaaataaataattcccaaaatcagattagtttctacaacaactattgccgatgcaaccacattaaatacaaactgaactatgtcagttatcccaaagaaatatttttgttcaatttctttagcagtaccactaatcgaattgattacatctgctcctcttgcttgcttcatgtctgaattagcaaatttagaataaaaatattcttgctttaaagcaatatttaatagcatcacaattctattttgaaccaaataaaacaagagcatggctatgtagactatcagatatgcgccaaaggctaagccaataaatttataaacgtggtcaatgttactaaaattgatattagttaattgtccaaacagtacagcatttaataccccttcaaatgctgaaatggccgataaaaccagaaaaactatttgtaaatatattggaacatgttttactacccatttaaaatttatttgttgtgtgttcattgtttaatacccacatatttctcataatcaacaagccaatcttcatcatttttataagaatgattcatacactttttaaacccaattgctttaaatcatcttcatctttagtttctaacaattgtcgctcttctagagacaagtgatacttattcactaaggcatcaatattctccaaagaaatatttttaccatcagaaagatcctttcttcataccttcagacattactatacctcctattttctctcgttaagtaatgcataattttcaacttgcaatttactgtgtatgggattgatatcaatgcttcccataattccccaaatgcttataataataacagtaagtattctcttattttttaatttcaaagccaggaattcattatgtacggtcaaaaatttaaagcacttcgtcttcaacaacatatttcactagagcaagctgctaacagagttatctctccatcgactttatccagatgggagaataataagattgatattcgcttcaatttagttattaagcttttagacaatattcatataaacctaaaagagtttactaattactgcaaaattaatcatagtaatccatttgttgcgaaagtggctatgtactatgaagccaacgatgatcgtcatattttgcaattaatacaaagcaagaaaaaagaataccaaaattcacataatcaatttgatttacttctactagctatcgcatgtaattgttattacgatctaactgataacaatgttttcccagtgagctatcaaaagaaattattctacattttatctaacattgaatattggacagagatgtacatcaatgtttttggtaacactgtttttctctatgacagcaaggaactatatagtatttcaatcagaattcttaaaaatttaaattctaatacatttaatgattttcaagaatattattatgctttatcctctgtcatcaacgccctaaccgctctaattatcaaaaatcccaaattagcatcacagcttttaactaaaatagagaaagtttcaattcctaaaccaatctcttacttaaaaattagaactaatgtcctcaagtatcttttagattaccgtttaggcaaaacagatgaaaagcttatctcaattaagctagaaaatttaaagtggttaggattaacagatattgcaaaagacttaactttcttctttaaccgtataaaaaatgatcgttcacctctttcctaattcatttgcctattatattaccctcatttttatctaattgatttttctttgcaaatatgcaaaattatttttagcaagaataaaaaagcctattaaatctaggtgtttacaaaccctgatttaataggtcttttatgcgtcttttttattgctcaatgtaattttgcgccttagttaaaatatccatcttctcatgttcagttaaatacttttgtgcttctgccaaattgacccatttactagctaaaatttcttctttttgaatgttaacctcttgtcctgcaacatagctagcaacaaaataaactactgtcttagctttatcaacagtcaactgatattctgttttttctctaaaagtaaagtcaaaattcggctttaaaccaacttcttcaaaaacttctcttctagcagcttcctcagctgtctcattattttctaaatggccttttggaaagccccaattatgatttacgacgctctgcacgatcaaatatttcagctcgccgcttctacgttctctgtaaataactgcacctgcagaatgttccatcttcatttttgtcacccaacctttatattgcataattattaaatatttattaacgtatgtcaagcaattgtaatcaaaaaaatgaccagatctttgacgatctagtcactttattcgcagacgaaattattaagttctattggtagaatattttaagttacttcttcaagttcttttcgcagtattccttgaccttgtcatcatcggccttaagaatccattcaactgcagcctcagtcttcatggtgtctcgaccatttacttccatttcgtggtcccaaatagcgtcacgaataggcatttcattacccttagcccagtcaaaaacttgatccatatttctatcaattaatgcagtttcttcaatttcttttgcatctgccataattaaaagcttcctttctgataacgactttattgtagttctattagctacaactgttaacaaaaagggacttttttatttaaattctaatttttgccattaactgcttcatcagccttattcactacactaaccgcattaagtgaacgaggataaccaatgaatggtacgttttgttcaatgaccttcatcaagaattccttgtcattgcctaatttgatatttgcttgagcatgggccatcaattgaggttcacagccaccttgagctgcaatataacagaaggtaatcatttcacggtcattgtcatccaagccttttctagtgtagtaagcgccaaagcaattatcaactaaccacttattgattgttcccttcttggcaaaacccttcatttgtggaccaaacaagcgcatttgagtttcctcacccttttcaaggcgattgtctagtgtagtagttgcttgacccgcaagaggtaattcaacgccgcgcttagttaaaacatcattagtaatcttgaaaaatggggaaactctacccaaacctaaataatcaaccgcttgatataaacttccttagcttcaactgggttaacaccattgtctagtacgactggaagcattatttcatattcttccttgccttgcatccccaacaaataagctaaagttgacaacatcttagtccggtcgggcaaatcaacgtctttttgcacttcgtcaaaagcaaaatgattaattctttccaaagcttctggatcagtagccttcaataagttggcatgtactctttatgcatcttctttaattgacataataaattcctttctaaacgcttatctctactatttatttaagtacgattgagtctaaaagaaaaatatctattttttattctgcaatataacttattcttatcaaaaaaatatcctaaaggctttttgccttcaggatatttctattaggttatttaattagtttttcttgtctgcttcagcatcatggtatgacttaacgatttcatcaactaattctggatcatctttcaaatcagtagtttctacaatgacatccttcaagtcttcatctttaagcatttgcatcaacttaacgctttccttgtcgttaggttcatcaaagtgataaattctaccaacagtttccatcaatgcactgtagtccaaacctctgtccttcaattcacggattggacggataaatctttcattgtagcctaacttacggattggagttctaccaacacgagcaatatcatctgaaatatatgggttttggaatctgctcaaaatcttgttgtggtattcttccaaactttcttcggtgaattccttgttccacttgtggtaaagaagtgaacgggtttcactcaagacacgcttaacttgctttaaaacaaatggatccttaatagcatccccaatagtgtcatagccaaggctcttgccagtataagcaacagttgcgtgtcccgtgttaactgagaataactttctttcgatgtaaggttcaaggtctggtgcatagtcaacgccctttaacttgatatccttgttcttcatttggctttcgtcaataacccattccttgaagtcctcaactgagacaaacaatggatcgtcattatgttggataggaacaattctgtctacagctgcgttagggaagccaatgtacttgtctagttcaggcttaacgtcatcgtccaagtgcttataaacttcttcttttaagtgttctgaaccgccaatcatgttttcacaagcaatcacatcaagtggagtagtgttgcctgattgaattctagcagttaatcctttggcaattaatggagcaatgattgccaaaatctttggaccaatggcggtagttatcatatcggttgatttaattgcttcaactaccttgtctggatccttagcattgttaattccatcaacatttgaaacatgaattctcttcttaccaggtgcggctaattcaatgtcatattcaccacgcttgtttaattcatcaataatagtttcattaacatcaacgaagtcaatgccaaaaccattatctgctaaagtttcaccaataaatccacgaccaatattacctgcgccaaaatgtactgctctcatgtttaatctcctacgttctttaataaatcaataatttcttctggtgtttgtgcgtctgcaagctttgcaacgttggaaacatcactacagaaaatagcaatctgtgacaaaatatttaagtgttcattgttcaaaccagcaatcccaaagacaacggttaccaattgctcggtatcatccttagggtcactaaaatcaacgcccattggaatttggactaccgaaattccagtttttttaatgtgcttcttaccttcgtcagttccgtgagggatggcgatgaaattacccatataagtcgacacatcttcattacgggcaagcattgaatcaatatactctggttcgacacagccgccatcaactaataattgaccggccattctaattgcttgatcccgcgttggtacgtcttgattaagtttgatcatttttggatctaattgtaatgccatttagctcatccctttctaattcaacttttgaatagcttcgccaagctttttatctttaagtaaatcatcaacaactagggtttgaatatcactgtatctgacagccaagttcttattagcagctggagtaacaattactaagtgacttggatcatcagtcaattcgttgattcttactgccttaacaggagtagtcttaccagccttcttaattgcgtcattgaataaactagttgccatagtagcggtacctaagtgttgatcgtgacggatgaagtccacttctttaactttactgaagtcgattccttcaagtgaaccaaccttcttaactggtttttcagcctttggcttatcttctacttgagttaaagctttgaagctagctacgattgtgtcatatttcggactactcaagaagttgccaaccgccacgtgcattgcatgtggagtcttttgtaaagcgcggtcagctaattcttcttgcgtgatgatcaacaaaccatcttcatctttcaagtttctaacagcggtattggttactgaaaccttaatgccagccttcttgaatttatcacgcaaaagtgaagcacccatagcagatgaacccatacctgcgtcacaagcaaagataattttcttaacattggcatatgacttaactgattcatgtgcatcttcagcttccggcattgattgacctttagattgggccttcatggcttgcatttgggcttgttttgcttctaactcatcaccagtactcttgtcgtttttaagaataattgcggcaataatgaatgaaacaactgcggcgccaagaacaccaacaatattaccgaaataagcatcctttgcggaaacaagcaagatagctaaaattgaaccaggtgaagcagctgcttttaatccaccaccaagagtagtgaataagaaagtaccagtaacaccaccaccaatagcggctaaaatcaatgatggcagcaccaggagctgagctctttgacttacccttgccaaataaagtaaaggcaagcaagattccaagtcctggacctgggtttgattccattaagaacaaaactgacttaccaacttgtgcagcttgttggatacctaatggaactaagatcccgttaccaatagcgttgttcaagaacaaaactttggcaggttcaataatgatgttggctaatggtagtaagtgaactctaataattgcatttactcctgcactagcccattgactgccaacttccataatcggtccaatgataaagaaggcgaaaatcgcagcgatcatgcctagaataccaagtgaaaagttattgtagatcatttcaaaaccagatttaatcttgtcctggaatacttgatctagtttcttcaataaccatgcactaagcggacccataatcatggcacctaagaacattggttgatcagtaccaacaattacacctaatgtaccgattgcaccagcaatggcaccacgttcttcataaaccatgcgaccacctgtataaccaattaacagtggcaacaggtaatgaagcattggttgaactaagttattaatttctttgttagggaaccaaccgtgtggatacataaagaatgcagcggtaagtccccaagcgataatggcaccgatattcggcatgatcataccggataaagctgtaccaaatttttgaaccttcactttaacagaagatttactttttgcttgagccattttcttcttcctctctcatcaacttacatttttattctaagtcaatcagtaagcgcttacaatgaaatgaaaatagaactctggcacacttttgtgccagagtctgagtttacctattctattaagcttttgaactattggttacctagtaaccgatctttgaggtcttgtaaaaaaagtgccgcaattgcttctttaatttctttttgactgccatttgtaaataaatctaagttttgactagacatgataatcatgctggaaatagtactcattacccgctgttcgggtgcagtaagattgtctggtgccagcatcaaaagaactcttttgacttgaatggtatcatgatccattgattggagcgagatttcattatctaagtcaaacatggtaaatgaacagcgtgtaatttctggactacgtgtgtgtagcaatgcgatatggctgttagggatgccaactggtgccattcgtacacgtttgagaagatttttggcaacgggcatttgcttacgaattagtgttgaatccgaatgggctaaacattcctgaattactgcaattaagtcttgcgaattgtattccagttgttgaatcttgattccgttgactagctccgagcaaaataatgtactaatcgatagcttagcaagttgttcgactgaatggggatgtttttcttcaactacctgtttagctggaactggttgaggatatttttgttcataatcttttaagtaagcgcggatttttattaattcatcatcaagcagtaatggactaacaagtaaataatctcttgagaagcccttcaatctcaaggttgaaaaaataagattgtaatttgacaagtctatttgatttaaggcagaaacacggctggttttgacttctttgatttcagaaaattctctttttagtttggcacctaagattgccgacgttccaatgccattttcacaaattactagggccgataaattacgctgctgattgcgactcgtgtattcattggcaaaataaagcaagatcaactgcaactctgacgctgtcaaataattttctggaaacgctaaatgccaatatttttgaatagctagatataaatcaggaaacttttgactaaggcctgccagaatttcaataggtgtatctggtaaaagagctactttatgttgtactaaaccaataacgtgtttcgtcactttagtcataaaactatgatctttttgaaaatcccaatgcatttcttcagaaacgtgttgaacgaattcttttactttgactgagattgctaattcgcgctcattataagtcaagtaagtgttgtgataatcacatgataataacttattagctaagtatgagacatcattttggtcaacctcaacttgccgcttttgcgcaaacaaggccataaaacggtaaacataaccctgatatttaagtgaatcagcactggggtggataaaatctagcttgcatcccgccagagttctttttatcgttaccgcaaaagttaaaattaactcaatcagcttttggtcactgtctagcttaattttaccaaacacgctttttttaagacaatcagcaacctctactagcaaagccttatcaatcattgtcaaaaacatgtctttgcttgtcgtttcattatgcagatacttaaaaaagttatattcattgatctgattgagcataatatcaactaaaacctgacgccgtattttttcaggcgcctgaattaacagtcccacaccctttttgcggatcaagtcaatatgatatcgttttagcgacctttcaaccgtattcaaatcactttgaatcgttgcttcactgacattcaggtcaagcgcaaattgaataattttacatggctccgtacttaaaagcaacttagctgcaattatcttctctcttttagctaccgaaattacattttgactgtgagattgttgcacagattgcttaatttcttgtaattgctttgaatcgccagataaaaaatattttcctttttgattttcaattttaaagtcgttcttctttaaatcgccaaattcgcgataaaccgtccggcggctgatctttagactctcttcaatttgtttgatacttaccccactcggatttcccaacaaaatttgaagaatgtgcttttgccgttgtgttaaaaacatcccatcatcctcgcttacgtttaagtttattatacttgaacgcaaaaaaagaagacagatctcaaatctgccttcttgaggatatttatttacatattaattattcaacagtaacactcttagcaaggttacgtggcttgtcaacatccaaacccttatcctttgaagcgtagtaggcaagaagttgagttggaactactgtcaaaagtgctgacatgtagtaattaatttctggcaacacgatcgtgtcatcactatttgcgaattccttgcctacaatagtaattactgaagcaccacgtgaagcaacttcttgaatattaccacgagtaagatctgcagtaactggatcgttaatcaaggcaataactggagtgccatcttcgatcaaggaaatggtaccgtgcttaagttcagctgcagcaaagccttcagtttgaatgtatgaaacttccttcaacttcaaagcaccttcaagtgcaacagcgtgatcaataccacgaccaatgtagaatgcgtttcttgattttacaatatattgatcagctaattccttaagcttttctttaccgtcaacaatttgttggataccttcagcagcgatggctaaatcatgttgtaagtcccaatccttagcatcttgattaccaagtttttcaccaagtgccttagctaaaatagcttgtaaggcaacttgtgcagtgtaagccttagttgaagcaacggcaatttcaggacctgcacctaaaagcattgtgtagttagcttcacgtgataaagttgagccttcaacgttagtcatagtcaaacttggaataccacgcttgttagcttccttcaataccacgcgtgagtcagcagtttcacctgattgagtcaagaaaataaagaatgggtgcttgctcatcattgggaagtggtaaccagcttctgaagcgtaaccaacttcggtaggaataccagtgtagtgttcaaaaatagttttaccaactaaacctgcatgataactagtacctgcagcaaagatataaaggcgatcagccttagaaatagcatcaataatatcttgatctacctttggttcaccattttcgtcaaggtagttttgtgacatgtgacgcattacgcctggttgttcatcgatttcttttaacatgtagaattcgtaagtaccctttgaagctgcgttagggtcgatgttcaaaacgtgaggttcacggtctacctttttgccatcaacagtttcaatagtgtaagaatccttggtaatgtcaccaacatcaccatcttgcaagtcaacaaaagtcttagtttggtcaagaacagaaatagcatctgaagcaatgatgttaaagccatcaccgattcccagcatcattggtgacttgttcttagcaataaatacgtggtctggttctgtgttgtcaacaagcaagaaagcatatgaacccttaaccaacttcaaagcttccttaaatgctgaaaaagcgtctaagttcttatcacgtgcaattttaccgatcaattgaacaactacttcagtatcagtatctgagtggaacttaaccccttgcaagtacttttcctttaattctgtgtagttttcaatcacaccattgtgaactagatagaaacgcttggtttcatcaaaatgagggtgagcgttatctacagttggcttaccgtgggttgcccaacgagtatgaccaataccaactaaaccttgttcatctggagtcaacttttccttcaagttagaaatacgaccaacagccttagttaagtattcgttaccatttaaatcatttaagtaaatgccagctgaatcgtaaccacgatattccaagttggttaatccatttaaaataatatctcttgcaggcttacctacaactccgacaattccacacataattttctcctttggtctagtttgctttgaagtaatggactagcttatttttattgttacagtaggtataatagtctttttgcaaaaatcggtcaagtacaaatattcaaaattggtattataattttaagcataaaaaatggctaccagaatttgctccgatagccatttttacttaagtcaattttaacttttattacttgtttttgatacccttaccttcatagcagtctctcatcaattgagaaatttgactaattaatggagctgatgggttagtaacagtgttttggtcgccataagcttcaacagctaattggtccaccttcttgtcaaactcagccttatcaacgccataatccttgaaggccatcttaataccaactgattcagccaaatcaataattttctgaactaatttttcaattaattcagcatcacttgaaccagttaagccgattgctctagcaatttcagcatagtcgctttcagcacggtaaactgagtaatgtggccacatagcaagtttttctggacgcttagcattaaagcgaatgacttgtggcaaagcaattgcgtcactgacgccacttggaatatcaaaagttgaacctacggtatgagcaattgagtgttccaagccaaggaaggcatttgaataagccattccagcaatcgtagctgcatcatgcattctctttctagcatcaagatcgccatcgtaagacttcttcaagttagcgaaaattgctttaatagcttcaagtgaccaaccacgagtgaagtcagttgccatggttgaaacataactttcaattgcgtgacctaatgcttcaaaacctgaccaagcaattaaacgtttgggcagcgtttgcacaaattgatcatcaacaattgaaacatcaggtgttaaagcatagtcacataaggtatgtttaattccagttttggcatcggaaataatagcaattggggaaacttctgaaccggtacctgaagtagttggaatacatacaagttggacaccattaatcttttggaaacggactactctttttctaatgtctaagaatttttggtaagcctcttcaaaactcatttctgggttttcgtagaataagcgcattgctttagcagcgtccattactgaaccaccaccgatagcaattacaacgtctggcttgaagatgttcattctgtgaacaccatccttgatcacatcagtattaggatcaagagttacagcattaaagacttcatattctttttgacctaaacgcttagaaatgatatcagtaacttcatcagcaaagccttggtcagctacaccttcatcagttacgatgaagaaacggttaacgtttggcatgtgacgaaggtagttagcagcgttatgttcgaagtaagtctttgatggtacctttacccattgcatgttatcacggcgtctagccactgttttgatgtttaacaagtccttagcaccaatgttgtgtgagaaggtattggcaccatatgaaccagtacccaaggtaagtgatggcaacatattgtggtaaaggtcaccgataccaccgagtgcagctggtgagttgactaagatacggcaagcatccatcttcatggcaaattcatcaataatcttcttgtcatttgagtgaagaccagcggtgtgacctcgaccaccatagttcaataaatcggtacaaatcttaaatgcatcgtcatggttcttagcacggtacaaagtgaagactggtgaaagcttttcagctgatagtgggaagtttctacctacgcctttatattcagcgataattactttagttgtctttggcacatccacaccacaaagcttggcaatttcataagctgacttaccagctactggaccagcaaccgtaccacgacgaggatcaataaagtgttcctcaaacttcttaatttctcctttgtttaagaagtagcagttccacttcttaaattcttctttaactttgtcataaatttcagtatcaacgacaactgaattttcagaagcacaaaccataccgttatcaaagttctttgataaaacaatgtcataaactgcacggtcaatattagcagtcttttcaatgtaagaaggaccattaccaggaccaacaccaatagctggcttgcctgatgaataagcagctttaaccatacctggaccaccagttgccaaaatagtttgaacacctgggttagtcatcaaatcgttcgttgcatcaaggcttggttcttcaatccattgaacggcatccgcaggagcacctgcagcaacagcagccgcacgaatgattttaccagtttctacacaacatttttgagcctgtgggtggaaaccaaagataatggtatttctcgtcttcaaagcaagcattgccttgaaaataacagttgaagttgggttagttactggagtaacacctgcaataacacctttaggttcagcaatcttagtcaaacctaattccttgtcttcttcaattacgccgacggtcttttcgtgacgcaaactgttccagatattttctgaagcatacatattcttggtagttttatcttcaactacaccacgtttagtttcttcaacagccattttagctagtgggtaagcattttgttcacctgcagtagcaactgcttcacagatcttatcaacttgttcttgtgtgaagttagccatttgatctaaagcgacatgtgatttctttactaagttatcgaccatgtcgtagatttgctttttcttttcgtcctctgtaagagtctctttttgttgtgtcttagccattgtattattacctctaagatctactaattcttgtgaactaatttacaatgtcaactatagcacaataactttatttgtaaatgcatgaatttatgaaaatagtgaattaacaaagattcacatttcctcataatttcgctctaatgcaaatgaaagctattccttaattatttgtttgtgaattaacaaacttatttttaaaaaacagatttttgatatttttttaaatctaactatagagtctggtcatactaattgataatgataaaatattaagtatatgtgaaaagattgagaacattggggggcttatatgagtgagaaaaaaacacagaccgcttctggttataaacgaaccctaagcaatgcacacattcagttaattgctttaggtggaacaattgggaccggcctttttctgggggttggagacagtattcaccgcgccggtcctagcgttatcctgatatatattattgtcggtatcttcctcttcctgctaatgcgggcactgggagaactaattatgtccgacttgaacaagcacacatatattgattttattgaacaatatttgggtaaaaatattggctttatcacaggctatttgtattggttaagttggattaccttgggtatggccgaaaccacggccctaggaatttacttcaagtattggtttccaacactgaaaccttggattccaggaattattaccattgtgatcttgctgttaatcaatttaatttcagctcgtgtctttggcaacttggaattcagttttgccattatcaaaattgtcacgattattgccttcgtcatcttgatcctttacttactagtaactggtggcaaaaccagctttggtcctgttagctttgctaaccttgacgatcatggcggcttcttcgcccgtggcagtaaaggattcttacaaggatttcaaatggtaatcttcagctttattggagttgaattaattggtttaaccgcggctgaagcacaaaagccagagacaacgttgaagcgagcaatcaatcaattaccaattcgaattattttgttctatgtcatggctattttaggaattttgttagtaattccatggtccaaagttgctactaacgctagtccatttgttgaggccttaggtgctactggtattaaaaatgctagttctattattaattttgtagttatttcagccgccgtctcatcaactaacagttttttgtatagtgctggtcgattacttttctctgttacttttgacggtaaaggaaaatggaataaaacttttggacatttatcaagaaggcagcttccacaaaatgcattgactttatccgcattattgatgggatgtgcaccactaatcaccttggttattggcgatcaggcctttaattttatctcatcaacttcaactagtatgtttttaatcatctggagtttgatgattttaactcacatggcttacaggagaaaaacagcagctaatcagctaaacgattttcaaatgccaggttacccttatatcgattatgtaatcttgtcattcttcgttttaatgattatcctgctattgattttaccaagctaccgagtaccaatggtcgctgcaattgcaatctttattgttttatacatcatttccaaaatttggagtaatgaaaaagctgtttaaagcaaaaagtcgagttttttagctcgaccttttattttgcaatttttttaattattttagcaggatttccggcaactaccgtattagctggcacatctttggttacaacggcattagccgctacaacggcgtttttacctaccgtaacgccaggcaatatcgttgctttagcgccaatccaggcgttttgtttgataacaactggctttaattccagttcttttctatgctgtggatccagcttgtgattaactgaaatcaggtaggctccaggcccaatcaacacatcgttctcaattgtaatcccgcctaagtcgaccatcatcacattggcattaataaacacgcgctcgcctaatttgatgttgtgcccataatcagaataaaatggtaaccgaatctctatactagcagctattttttgaccaattatttcactaatcaattgtctaacttcacagctacaatgccgttgtgtatttaaattctgcaataatcgctgattctgttgggctagttttcgacgtaaatcgtgatattctgtttccattattaccactcctttttcttgctctacttcagtttaaagggtaagcttatcaatgtgcaaagcttataaggtatgaagtataataacaattgtttataggtgatttaaatggaattacgtgttttaaattattttgtcgctacagcgcaagaattaaatatgacgcgagctgcacaaaaactattagtctcacaacctgctttatcgcgtcagatagcagatttagaggatgaattaggcgttaagttattcaaccgccagccgcggcacttaaccttaactcctgcaggacagtatttatatgaacaagcaaaagaaattcttactttagcttccaaaaccaagagtaacctacaatctagtgctgtcatcagtggtgacctaactattgctgccggcgaaagttttgccatgcaacgtctaatgaatatcgtcagcaacattattcgggattatcctacagttaaaattcatattctaagtggcgattatgaatttgcagaaaggcgtttagatacaggtgcagttgattttgccgtaatcattggtaatctacctttagataattatgcttctctgcagctccctgagaaggatacatggggcgttttaatgactaaggatgatcctctagcaaaaaagagtgctattacagctgaagatttagttggacgaaacgtcttaaattcacaacaagccgaaaatcgaaagtactttgattcatggttcggtaattataaagagcaaattaatatcatcggtactgttaacttgaatttcaacggtacacttttagttaaaaataaagcagctattatgctcacactcgataagctagccaatatatcagatgaatccaatctaacttttagaccaattactccaatgttaaaacagccggtaacagtaatttggaagcgagaaaccaataaatcacctgtagctgatttattcctaaatcgtttacgagcatcaattgatgacgattaacaaaaataacctagatcgaattgatctaggttattttttactttatttctttttacgactaaaacgttgcttcaatcgttgccataagcttaatgccctgcgcatatgatcagctggtacatattttcttattgctcgcaatacctttttggaatcacgtgccgcaaaaacaaatttaccatttgacttagttctgatttcaaaacgcggaatataacgtccaccaaagcggacatctgcaaccacataagttacttcattccaaggaatctgaacataatcttcaacgtttcgttcgttataaaattcaaaagctctatcgccgatcatgattttgccgtatgatgcaattcctctaaaccaggttgcatcaacagtgagatcgacttttgtattaattgacttagccatttattaaagaatgccccatacgtggaagagaacaccgacaacgaagataccgatgataatccagattggtgaaactttcttcttcaataaccacatacagaagaaagttaagagcaaaccagctaaaccaggaattaattggttcaagttgtcttgtaaagtagtaactttagtactgcttaaagctttaccgttacccatatcccattgttgaagagcggattggatacctttagcacctgatggaagcttgtcccattcgatgtaaccacccttttgaataggagtttgagaaacaattggagtgaacttgatgtttacccaacgttcaattaaggcacccaagacgaacatacccatcattgaagcaccacgggtaaccttttgaagcataccacctgacatatcactggtgatagctgaaccagccttgtaaccaaattcttgtgtgtaccataagaatgcgattctgataatattccagataacgaagaacaagataggacccattacgttacctgcaatggccattgatgcacctaatgcaccaacaattggacgaacagtgtaccagaatacagggtcaccaacaccggccaaaggtcccatcataccaaccttaacaccttggatagcgtcatcagtaacttctgcaccgttagccttatcttcttccaaagccaaggtaacaccaagaacaggtgatgctaagtatgggtgagtgttaaaaaatactaagtgtctttgtaaggcagcagataaatctttcttgtttgggtataactttctcaatgctggaatcattgaataagcgtaaccaccgttttgcattctttcatagttccatgaaccctgaaggaattgtgagtgccacataacgttaaaacggtcgcgcttggttaatttagttttcttatcagccattatataaatcctcctctatgcgttcattttaatagtcatcaatgatatcgccgagtggatcgccagtgccggcatcgccagaattattgtttccaccgttgccacccttagcttcaagagctaagtacatcaaagccattgaaaggccaatagcaccaagggcgatcaaagttaagtctttgatagcagcaagggcaaaaccaattgcgaagaatggccatacttccttacttgccatcatgttaataaccatagcgtaacctacggctacaaccatcgcaccaccgatagtcataccttcgtttaaccattgtggcatcattgcaagccaacttctaacagtacctgaagggattgctaaaagaagtgcagctgggatagcaattctcaaaccttgtaaacatacggcaatccattgccataagttgatcatacgccagttacccttcttagcttctgcgtccatgatgtgaacgatagcagttgaaatagtacgtacgatcatagttaagaacaaaccagcaacagctaatgggatagcgataccagtagcagtaccaatacccttaataccttgaccaccttcgatcaagataatagctgaagctactgatgctaaggcagcatctggtgcaacagcggcaccaatgttagcccaacctaaagcgatcatttgtaatgaaccacctaaggcaacacctaaatccaagtgaccggttactaaaccgatcaaagtacaagcaactaatggttggtggaattgccattcatccaagataccttccataccggcaagaaaggcaacaaacacaaccaaaatcatttgaatagcgttcatttatttactcctaattatttattactttttttcgtcaagtaaagtttgagccttcttcaagatagcatccatattacctggagcatctgaaggaacttttcttacatcaaacttaacgcccatcttttcaagttcacggaatgtatcaacgtctttttgattcattgataatacgttgttggcgttaacatcgccttccttatatgacattgaaccaacgttgatattcttaagatcaataccgcctttgatagccctcaatacatcttctggattttcaaacaaaagaagtgcatgagtgtttccaaatcttggatctttagcaatttcttgcatcttcttgagtggaacagtatgagccttaacacctgctggtgcagcttcacgaatcatactcttacgtaaatcatccttagctacactatctgaaacaacaattactctatcaggcttcatagctggaatccaaccagttgccacttgaccgtgaagcaaacgtgaatcaattcttgccaaaacgtacttgatatgaccatcaccaataacagtaccttctggaatgctcttcttactgcccttagcagcagctttgtcagctactggagctgcagcagccgtcttaggcattaagtcagctggcttagtcttaattccatctctaccaggttgaacaactgcagtggcgatgtgctttgcagttgcattagcatccatcattctctcagtcaatgcttgtacaaccattggtaaattcataccagcaacaattgcccatttatcatgcttttcagcaagtccatttgcttggttaaatggagtaccaccccataagtcaaccaagaacaaaacttcatcttggttatcaaatgaagcaattgctttttccattttgccacgaatgtcatctggaccttcatcaggctttaagataacatgtgcaaaattatcttgttcaccgaaaagcatttgtgcagattgtgcaataccatcggcaaagccaccatggctggctaaaacaattcctaccatgtaatttcctcctctagatcaaaaaatgaatccgcttttattatacgataaatatagactttaaaaaagtgttttttgaaaataatttcataaagtgccaatttgtttcaagcagtccaaatgccttgtctcccaagcaaagacagaaattagtctaataaaaaaagaaagcctgttttcatgatttgagtcgtttttcacaaatttggcttcctattaaaatatatgctggttggataatttcattttcataaaataacaaaaaaggaagccttccgcttccttctcccctttactccggctgtcagactcgaactgacgacatcttgattaacagtcaagcgctctaccaactgagctaagccggaatattaaaaaagagcacggcagcttcctttcctcgcaggcagttgcccaccaactactttcggcgttaagaagcttaacttctgtgttcggcatgggaacaggtgtatccttcttgctttcgccaccgtactcttttgagcttttacactcaaaactaaacataatccttctcgcaaaaaaccttccagtttgcttcgctttggtcaagtcctcgactgattagtactggtccgctccatccttcacaggatttccactcccagcctatctacctcatcgtctctgaggtgtcttactgcttacgcaaaggaaatctcatcttgaggggggcttcgcacttagatgctttcagcgcttatcctttccgcacatagctacccagcgatgctcctggcggaacaactggtacaccagcggtgcgtccatcccggtcctctcgtactaaggacagctcctctcaaatttcctacgcccacgacggatagggaccgaactgtctcacgacgttctgaacccagctcgcgtgccgctttaatgggcgaacagcccaacccttgggaccgacttcagccccaggatgcgacgagccgacatcgaggtgccaaacctccccgtcgatgtgaactcttgggggagataagcctgttatccccagggtagcttttatccgttgagtgatggcccttccatccggtaccaccagatcactaagtcctagtttcctacctgctcgagttgtctctctcgcagtcaagctcccttatacctttacactctgcgaatgatttccaaccattctgagggaacctttgagcgcctccgttacactttaggaggcgaccgccccagtcaaactgcccacctgacactgtccctggcctggcttacaggtcgaggttagagcatccttcaaacaagggtagtatcccaacattgcctccaataagactagcgtcctatcttctctggctcctacctatcctgtacatgtttaaaagatactcaatatcaagctacagtaaagctccatggggtctttccgtcctgtcgcgggtaacccgcatcttcacgggtattataatttcaccgagtctctcgttgagacagtgcccaaatcattacacctttcgtgcaggtcggaacttacccgacaaggaatttcgctaccttaggaccgttatagttacggccgccgtttactggggcttcaattcaaaccttcgcttacgctaagctctcctcttaaccttccagcaccgggcaggtgtcagcctctatacgtcatcttacgattttgcagagacctgtgtttttgataaacagttgtttgggcctattcactgcggctaaccaatctcttggctagcaccccttcttcctaagttacggggtcattttgccgagttccttaacgagagttctctcgctcaccttagtgttctccactcgactacctgtgtcggtttgcggtacgggtatgtcatctctggctagaagcttttcttggcagtgtgattaccacaccttcgctacttttaattcactcctcttcacaactcgtgttgctggttagaagcatttgactcttaaccgcacttgttgcttgaacatcgttccatcgcgatgcgtgcttcacctcctgcgtccctccttcgctcttaacgatttgacacagtacaggaatctctacctgttatccatcgactacgcctctcggccttgccttaggtcccgacttaccctgggcggacgagcctgccccaggaaaccttagtctttcggcggataggattctcacctatctttcgctactcataccggcattctcacttctaagcgctccattgatcctctcgattcaacttctccgctcttagaacgctctcctaccacgtgctctttaaaacacatccacagtttcggtactatgcttagccccggtaaattttcggcgcagcgccactcgactagtgagctattacgcactctttgaatgatggctgcttctgagccaacgtcctagttgtctacgcaactccacatccttttccacttagcatagatttcgggaccttaactggtgatctgggctgtttccctttcgactacggatcttatcactcgcagtctgactcccgtgtatggatatctggaattcgtagtttatctggattcagtaacccctgacgggcccctagtccaaacagagctctacctccattatcctctccacgaggctagccctaaagctatttcggagagaaccagctatctccaagttcgtttggaatttcaccgctacccacaactcatccccgcaatttttaacttacgtgggttcggccctccagtgcgttttaccacaccttcagcctggtcatgggtaggtcacttggtttcgggtctacgtcacctaacttttcgccctattaagactcgctttcgctccggctccgtcttttctgacttaacctcgctagataacgtaactcgccggttcattctacaaaaggcacgccattgcactttaatgtgctttgactacttgtagacacacggtttcaggttctttttcactccccttccgggttcttttcacctttccctcacggtactggttcactatcggtcactaactagtatttagccttgcgagatggtcctcgcggtttcaaccgggattcctcgtgtcccggcctactcaggattctgctaggcgtgcttgagatttcgcttacggggctctcaccctctctggcttaccttcccagataattcaactatctcttacactgccacgtcgcagtcctacaaccccaaatgataaatcacttggtttgggctctttcctcttcgctcgccgctactaaggaaatcgatctttctttctcttcctgcagctacttagatgtttcagttcactgcgtcttcctttgattagctatctattcactaatcaataatgcatctctgcattgggttcccccattcggatatctccggatcactgcgtacttaccgctccccgaagcttttcgtagttcgtcacgtccttcttcggctgttagtgcctaggcattcaccgtgcgcccttttctacttgaccttactcaagaattcttttctcggtcgctctacaatctgttctctttgattgtctcggtttttttgcttggattatattcagttttcaatgtactagctctttgatcctttttctggatcaatggaggctaacgggttcgaaccgatgacctcctgcgtgcaaagcaggtgctctcccaactgagctaagcccccaaagtattttattttcggccagacataactttaactctttttcttcgttatgtcaatgggcctaaatggacttgaaccatcgacctcacgcttatcaggcgtgcgctctaaaccagctgagctataggcccgactaacgcttggcgtttttcaaatctttgaggtactaccctcaaaactaaacaaagtttctcagtgtgcttccgcttgctctggatacttctcttagcattcctgctctccatatccttcgcttccttagaaaggaggtgatccagccgcaggttctcctacggctaccttgttacgacttcaccccagtcatctgccctgccttagacggctccttcccgaaggttaggccaccggctttgggcattgcagactcccatggtgtgacgggcggtgtgtacaaggcccgggaacgtattcaccgcggcgtgctgatccgcgattactagcgattccagcttcgtgcagtcgagttgcagactgcagtccgaactgagaacagctttcagagattcgcttgccttcgcaggctcgcttctcgttgtactgcccattgtagcacgtgtgtagcccaggtcataaggggcatgatgacttgacgtcatccccaccttcctccggtttgtcaccggcagtctcattagagtgcccaacttaatgctggcaactaataacaagggttgcgctcgttgcgggacttaacccaacatctcacgacacgagctgacgacagccatgcaccacctgtcttagcgtccccgaagggaactttgtatctctacaaatggcactagatgtcaagacctggtaaggttcttcgcgttgcttcgaattaaaccacatgctccaccgcttgtgcgggcccccgtcaattcctttgagtttcaaccttgcggtcgtactccccaggcggagtgcttaatgcgttagctgcagcactgagaggcggaaacctcccaacacttagcactcatcgtttacggcatggactaccagggtatctaatcctgttcactacccatgctttcgagcctcagcgtcagttgcagaccagagagccgccttcgccactggtgttcttccatatatctacgcattccaccgctacacatggagttccactctcctcttctgcactcaagaaaaacagtttccgatgcagttcctcggttaagccgagggctttcacatcagacttattcttccgcctgcgctcgctttacgcccaataaatccggacaacgcttgccacctacgtattaccgcggctgctggcacgtagttagccgtgactttctggttgattaccgtcaaataaaggccagttactacctctatccttcttcaccaacaacagagctttacgatccgaaaaccttcttcactcacgcggcgttgctccatcagacttgcgtccattgtggaagattccctactgctgcctcccgtaggagtttgggccgtgtctcagtcccaatgtggccgatcagtctctcaactcggctatgcatcatcgccttggtaagcctttaccttaccaactagctaatgcaccgcggggccatcccatagcgacagcttacgccgccttttaaaagctgatcatgcgatctgctttcttatccggtattagcacctgtttccaagtggtatcccagactatggggcaggttccccacgtgttactcacccatccgccgctcgctttcctaacgtcattaccgaagtaaatctgttagttccgctcgctcgacttgcatgtattaggcacgccgccagcgttcgtcctgagccaggatcaaactctcattttaaaaagtttgaatgattgctcattccttatttaagatctttgtctcaaatttattgcttgcgaattgacttcgcttcttgtttgggtttttacacccgcacgcttttagcgaaactttgttcagttttcaaagtactacctctgtcttgctttttttgcaaagcagacagcttttatattttatcaaaccatcatttctttgtcaagaacttttttgatttgtttttttcgtcttgctcaagctttttctgctttcacctgacgacatttaaatatattaccagcttatttacttctttgcaagtactttttttctttttatttgttttctttccttacatgtctgtttttaagctctcgtcgcatctctcgaagcgactttattaatttaccttattttctccgctttggcaagtcttgctcttcgttcgcaatcttttagaaacgcttggacgcgctgtaattatttctttatttctatttcaatctacctttttctttttgcttactttatttttatccttacgcttattattcgagttttactgttttttctcttaattttagtacaaaatttttcgaaattttttcaaaataattcaaaaaacagtgttttgcctaatttttcactcaaaaatgcaaaaaaagacgtttatcaaattgatatagtcctactttagtagacagtacaaatatataaaattgtactatctatgaaagcaggactttttgtatgtctagaaaaagtaaatttagctatgaagctaagcttaaagcagttaaacaatacataagtggcgaagcatcacctgcttcaattgcgaaagttttaggggctggcaagactacactgcgccaatgggtatatgcatttaaagatcatgggccagaagcattaagaccacataaatataatcaaagatacagtaaagattttaaactcaaatgcatagctgcctatttaaatggcgaaggctcatatgattatctaacaaataagtttggtttgcgaagtgctgcacagttaaagcagtgggttatcaagtataatagtcatcaagaactcaaggactacaatcctattctggaggcttatatgactaagagaaaaaagacaaccctagaagaacgtaaacagatagtgaaatactgcaaggatcatcaatggaactacaaggaagcagctcttaaatttggctgcagctatgcccaagtatacaactggtcaaaaaaatacagcgcaaagggaactgacggcttagcagataggcgcggtcatcgtttaaaagaagctgagctatctgaaactcaaaggctaaagcgtgaaattgaacagcttaaaaaagaaaatgatattaaagaccaagagatagccttcctaaaaaaagtgaaggaattagaaaggatgtgtttgctggacagccaaaacaaagacaaatagcacttaaacaacagcagcgaaattctctttacagtttgatcaaagaatgtcaccgagaatataagtggtcaattgaatggatgtgcaaacaagccaatattgcccggtcagcctactacaaatggcttaatcataagccaagcaaacgtgaactaagagatcaaaagattcttaagcgtattaaagaaatagctgagagcaataacagcctctttggttctcctaagatgactttggctttaaacaatgagctagcagacggtgaggccaaaatataccgtagaactgtggctcgcttgatgtgcgtgaatggcatctatactagcaaggccagatttaataagaggtatcgctatcaagctgctagaccggaagaaactgccgaaaatctattgcatagagacttcaatgccactaaacccaatgaaaaatggtgcactgacattactgaagaaaaaattcctggaacaagtcaaaagatttatctctgtactatctttgatctatatgatcgtttccctgttggctatgctttaagcaagcgcaatgatacagccctagttaacgctgctctgtcaactgcttggaaaagagagcccaatagtcatgcaatgcttcatagtgatcgaggatttcaatttaccaggatgccttttaagcatgagctagaagaacatggcatgccacaatcaatgtctagaattggccgctgtattgataatggcccaatggaaggctggcaaggtttaattaaagaaatgcgagaagttctttatccgaaggcaaatagctatgaagagatggaaaaagcctttaaagcaagtattgaatactatattaattatgatcctcaggagcgcttcaatggcaagagcgcaggtcaggttagaaaagaagctaagaataatccagagaatataatttcatatccaataaaacaagataaaagatataaagacttttggaaaaagattgatgaaaagaaaaatcagctcgcacaatagcgaactgattaatcaaattaatttatatatttaagctgtctacttgacacggtacggatcaaatataatcattcgataaacgtctcattttatatctttagatgatcaatctttagtgtctattcatcttttttcttacgtttttcaacgccaagtaaactaatccaacctaaaccagcgagtaatgtaccaatcaaacctagtgtgtgtttgtgttcactaccagtttgaggcaataaatcttgcacggacttcggttttgcatttaatttgttagctaattgctttctttctgttttccctattgtcctcttgccagattcaatgtctgctgccttaactgggccgttagcgcgtttctttcgacctgtaggcataccttcatgcttaggattgttattagagtcatagcccttcttatttgctttagaatgattatgcttcttttcactttccttatttggctttgccggtttatctggcttcggctctggatttggttttggcttcggttgaggttctggttccggagtaggtacttcatcttgcttgtaagtaattttaatattactgtcagccgtatctactgaaaccttttccgctgccaccttactttgtgaagcagtgtagccactaaatgttggagcagtatatgcatcccactgagtattaccatctaccctccactcactgtatgtaactttgccagtaactttatcaaacgttactttttgcgtggtaatcagcttaccacctgaaggcgtaatgactgtaattattctagttggagtcttagtcaaagtatccaagtgatcatagttcttacttggatcaccttgcactgggcctgttggaacatcccttggtggagtttctggagtaacgataatggtgtcgtgttcaacccttacagttacagttggaatgccatcagcagttgcaactactgtcttagaaatatcctgtcctgaaacaatcttccatcctgctagagcttgtggatttacatctactgtttcactggtcttgccactaagcggagtttgccctacttctttgccatcactatcaacgtaagaaatcttccccgtttgagtgttgacagtataagtagcagtgacttcactattggcaaccagctttccagtaaccaagtcatatacggcagtccgcgtaaattcaacggtctgtttcttttgatcttctgaaatctgagctagttggcaattcttgatctggtgctaactcgtagttctctggaagcttcaaatcaaggttatcaacagttgagccagcaacgccagacttagtaattgtctgaccaacttgcttgttaccttcttgagtatcttcaaattcaatagttaaagttgcatccaaagtaaacttagcctttgaagaaatattcagcttgtagtttggatttgctttttcaagggcagtaatactttctggagttaagttaattacataaacgccagattcagctggaattccatttgcaaattcataagtcaaacctgccggaactgtaatagcagttggaacattaactttaaagtttgttccatcaattactggtacagtgctttcttgactaccagaaatcgttacattttcttcagctggactaattacataagtgaattgaccactttcagaaactgcatagttaggattatcatcttgcaatttcttcaatcccttagcagttaaggcaatgtagtaagtaccggcatttgttggcgcagaaattggcttaccattggcatcgacccattcataatcaccagctgctaggttagcagtattcaacatttcaccgcttactaaaccagttggagtgaatacaccgaagttggtagcttgagtgttaatcgttgcaggttgaccatcgtacgtcttgccatctgcgcccttactattaccgtcaagaactacattaagatccttttgtttaattgtgtaagtggcagagcctagcaggtcttcagcatccaaggtgacatttccttgaccagcgtattggttaagggctttttgcaagttaacaataccattggcactcagcttaatcgtgtaagtaccagcattaactggtgcgctgccagcattccaaatataatcaccgtcttgcagagcatacgtactttcggtagttgaacctgggaaagtaaagtgaactaaaatttgaccattgctgttaacttgtgcagttgttacagctgtaccatcaaatgtcttttggttagagccattaagttttgcgtcagcagtggctgcagtaactatgtagttagctgttgtcttaaatgtccacttgtagttagcaccattattaccagttagttgcttaagcttttcttgaccagcctgtgacaatttaacttggtaagtaccgacattcgttgcattaccaacaatttgcaaatcgtcagcagttaacttaagtgtctgagcttcaccatcagcggagtaaaccgtcgcatcgtaggttacgttgtacttattcaagttaagtccacttggtaaggtttgcttagcatcataagtcttgctgtcaccactattcagggtaacagtagcttcgccctggttaatggttaatgtacccttagtagttacatcagctgctacttgtgggtatgcgtagttagtacccaaagctttttcaatgttatccaacccttgcgcagataattccacgtggtattcaccgacattgcctggggtttgatcaaagatcaagtcaccatctttagcagtgtagcttaaattagtactattagtactatttttaccatacgtatatttacaacaacataatccttgcctggatcaggaacattaacttgccaagtttgtccagcttctttaggtaggctccatgaaccataaatcactttaaatcctggcgttgttgaatcacctgctgtttgatcccattgccaattaccataagtaatcgtgttattagcaacatttaaactaccagtctgggcatagaatacctgtatttgtgaatcaggtgcaaattgttgaccattcttgtcaccaccagcaattacatatttagccgttactgttctcgcttgctgttttactggaatatacaaaacagtgtgaactggacgggcttcataaactgaggcgttctcagtatatgctagagactccttaccctcactagatgtatcttccttattccaagttgggtaaacaaattggtttgctgacctggatcgccgctcttattgtaagcactataagaaacttccttattattttgagtagaaacatctttagtatcttctggactagtagcttttttatcttctgcctgtttagttgaattctattcggttgaatttttgctagtcaaaggatcggtaccgctaacttctttttgagcagtagtatcgttatcattcttaccagctgtcgtagtctgatcatttccagtatctgtggtagtcttcttagccgactcaacctcttctgtttctactggatccgtagtatccgcatgaaccgtttgacttgtattcatcgtccaaagcaaagttgaaagcaaaacggaacaaactccaatgttcaattttctaatactaaagcgctgcttgccttcaaagtcatttttattaaaagtcatagtctctcaatcctcttaagttatgttttatctctaacttatagtctttctattacacggttttattctattcatctattttaatcacaacaaaaaagcaggcttaaattatatgcaaaaaaatcgttattttaagttgtcagtcacaacaactaaaataacgattttattgtgctcattttttaattaaatttaggaattaaattaaacctgattctttagtaatcttcttcataccattcatgtaaggaacaagtacatcaggaacagttactgaaccatcttcgttttggtaattttccaaaatagcagctacacaacgaccaacagccaaacctgagccatttaaagtgtgtgccaagtgaagcttgccgtcttcatcacggtaacgaatttgtgcacggcgagcttggaagtcagtacagtttgaacaacttgagatttcacggtacttgtcttgtgcaggcatccaaacttcaaggtcgtaagtcttagcactagtaaaacttgcatccccagttgaaagagcaactacgtgatatggcaagcccaacttttgcaataagtgttccgcattatgagttaacttctcgagttcatcccatgactcgtcaggctcacataccttaaccatctcaaccttacggaattcgtgcattctgatcaaaccacgagtgtcccgtcctgctgaccctgcttcacttctgaatgctggtgacaatgcagtaacattgattggcaacttgttttcatgaataatttcatttctgaagtagtttaccaatggaacttcagcagttggaatcaaagttaagtcacgtggcttatctggatcgtcattatcaacgatggtataaacatcttcgtggaacttagggaattgaccagttccttgcattgatgcatcgtttaccaagtatggtgggataatttcggtataaccttccttagtgttttcatcaaggaagaagttgaagacagcacgttccaaaagcgcaccagcaccgatgtagtaaacaaaacgtgcacctgaaacctttgaagcacggtcccagtctaagatgccaaggtcagtaccaatatcccagtgagcttttggcttaaagttaaattcagtagttgggtgccacttacgaacttcttcgttgtagctatcgtccggaccaattgggtctgaatcagctgggaagttaggcaatctaagcaagatgtagttttgcttttcagttaattccgcaacttccttatctaagtctttgatttccttacctacttcacgcatagcagcaattgcatcgctagcatcttctttgttacgctttttttctgcaatttgcttagaaacatcgttacgcttagcttttaattgttcactcttagtcaaatcttgacgacgcttagcgtcaatttcaactaattcatctaattcttctggcttaatgccacgtgtagccaactttttctttgaccaatcaagattctcacgaatcactttaatatcaagcatataaaacctccgtaatatgcaaaaaagagccgacttatccctacacttgggacgaatcggctcttacacggcttcgcggtaccacccagcttcagtctatctagactgcacctctttaccagacgagtaacgacgtcaaaccgtgcaactattaattgcccacattattgaaatctggaagcgactatgcattcactcgcaccaaccgtgaactctctgaagcagtcttaggatttcgtgtttgcatttattttaagccattcttcttttttgagcaaataatatttttctttaaacgaaaaaagtgcactaacttgtgtgtaatcgacagtataaacatactgaaatcctagtattttaagcaatttctgtgatttttcattatcggcaaaagttccagcccagacttctacttgctttttctttttaaaagcataggtcaaaatcaattgtaaagcttcagtcatatagccgtgaccttcaaacgactgatctagcaaaaagccaacttctttagtctttaataggccactcttttcatctaagccgcgttcatacaattcaaccagaccgatcacttcattgttcttgcgcaagcaaacgacataactttcaggacgcgacatatattgcttcacgccattaaccgcctcagtcagattgcgatattcctcaaagccagccatcttgtggtagcgcggattgccaccccacttcaataactgctgtgcatccttttcttcaaaaggtctcaaatatattctcttagattcaagcattagttacccatcagcttcaagagccactttgcaccaaactgtaggcctatactataggcggcaattgtccatggcttacacaaaataataatccaaaaataagtccaaaacttcattttagtcaatcctgctagcaggcaaagcacgtcatcgggagctgctggggcgagaatacataatgcaaagaaccaattaaatttattctgattctctgtccacttcatatatttatcaagcgtttcttccgaaacaatatgcaaaataaagggccggccgtagtgtctagctaaaaagaagttgataattgagccaatacaaatccccacgtagttataaataaacccagcaaccgggccaaagaagaccacgcctcctaataaagacacgcccccaggaataatcggaataactacctgaacaatttgaatcaacacgaaaataatcggaccaacaatttgtttattagccagataagcccgcattttagcttgatcggtaaagatccccaaacggtaccaataaatcaccagcaacacgattgcgattccacaaactatagttgcaatattgattaatttacgactagccttagtcgatagatgcattttctcgccttccttcatcgcctagtagttcaattttaacaaaaatccagcccagataccgtaaacatgcaaatctaaaaaaagttttattattttagctactttgggcagatactatataataaagttaataagttattagaaaggtaggcatcttatggttgtaattaagaatgatattgtttatgacaagactaaagaattaaaaacggatatttactatcctaatgatacatcttctaataccaagattttaatcttctggcatggcggtggctggtttagaggtaataaagaaagcgtaaaaaatctaggtattcgctttgctaatgcgggctttatgaccttcatccccgactactccttagcacctaaataccactttcctgctgctaatgaagatgcattgcactttgtcgactggctgttgaattctgaatacactgatcaagacgatatcaaaaacattgttcaaattggagccagcgttggcggtgaaatggcaattgaggttgctgggaaatacggtttccctactgtcacctggtctgctccagttgaatattcaaactggattaaagatcatcaagatactaaagcatccccagatgccgctaacgattttggcattaccgatcctgaaaagatcagacaatctttctacaagtacttcacattaacctacacaggtactgaagatgaggctgtattacaaaaattagacgctaagtcatttgactatagccatctcaagcaattaatgatgattaattccgcagatgagttgacaccactagctacagtattggattttgttaagttcttagctgacaaaaacttaggcgtacagctcctcgtaattcctggtcacggtcacgccatggcttatggtcccgattatgtagatgaatcactcgactttttatatcaaactattaagagacaaaattaagtatgattaacatccaaaaattcgttcaagtcagaaagaaactaaagttatcacaaactgagctttgccaaggcatttgtacccagtcgaccttaagtaagtttgaaaataatgggcaagtgccttcatttaaaattctcaagcagctttgtgaacggatggatattgatgttagcgatattatggacagcagtgagcacaaatatatcgcgcatatcctgtttgaagcggattttgcttttatcaattttgattacagtaaaatttttactttactttcacaaatcaaccccgaagtagacctaaaacgccaaacaaatcggattcattatcactatttgcgcggacaatatgctctaagaagtgatcgcaatcaaatgagtgcgctcttttatttcaacaatatcttgaccacccaggaattgcctgaaaatgatatttaccgcttgttggcattaaatggttgtagtcaaatctatgctaaacaaggtgaaacagagaaagccgagcactattatagtcaagtattaaagaacattatggacgtcaagatcgataatattttgactacaatgcatgccttaagtattttatgtgatgccggtgaattctatggcgaacgaaaaatgtatcgtgagtctaatgcattattgcgctatgcctataagattggcgctgagaagcacgtgattttttacatggcacgcatcctattgcggcaaggcatgaatgatattgatcagtcaaaaaagaaagcaattgctatccaacatttgcacgatgcctgtgcttttgcccgaatcaaccgcaacacgattacgctaaatcaggctaaaaaattactaaaacaattaaatggctaacaaaaaatccccaaaattggggattttttagatgatcttataaccagtaaccggcttagcaggtactgcattaaaatcatacctagctaattgttcaagctcagtattgccatcaataattgtagttacgccttgcgcaagcatcaggttcattactttatctttattaggatccgtggtaaatggcaccagtactactggcttatgcaaagcacgtataaaaccaatttcaaaagcactaccatcatcaatgttatccatatcatacaagaaaacaccgcaggtagcattaacgattccttccaaatcattattatatgtagcaagacgccaagtcatgctacggatgccaccaatttcaggattcttttcatccgggtcaacaaaattctgatcaaacgggaaatgcactctgactacagttggattttgttctaacaatgcccgtgcttgatcaacgcgagcgcgttgttgatcattataaaatggtgagcctaaataaatcttagcggttgaaactgattcggtcatgcttttatcctttcgtgactaaaaaactattaaattatttttcattctagcatgtcttttttacaacgaaaagcccaaattactgcgtttttactgcaaacgctttataatagaaacataacttattgaacataaacattaaacttattggaggaattattttgtctagatatcaatcaattaatccatataccaacgaagaatttgcaagctatgataatcctactgccaagcaaattgacgatgcgattaatttagcccatgctttatataaaaaatggcgtcatgaagctcctgaaactcgcgctcgtcaattacacaaggtagcagataccttgcgcgaacacgaggatgatttagccaaaatgatgactctagaaatgggaaagcttttacgcgaatcaagagaagaagttgaattatgtgcttcaatctgtgattactacgccaaaaacggggtcaagatgttggctcctaccccaattgaatcaggcttaggcaatgcctattacctgaaacagtcaactggtgtcatcatggcctgcgaaccatggaacttcccgctttatcaagtgatccgggtctttgctcctaactttatcgtaggtaacccaatcttactgaagcacgctcacaatgtccccggctctgctgctttgactgctaaaatcatcaaacgcgctggcgctcctgaaggcagtttgattaacctttatccaacttatgaccaactaggtaaaattatcgcagacccaagaattcaaggtgttgctttaactggttcagaacgtggtggttcttctgttgccgaagctgctggtaaaaatttgaagaaatcgaccatggaacttggcgggaacgatgcctttatcgtcttagatgatgctgatccgcaagtattgcgcaacgttttaggcgatgctagaacttacaacgatggtcaagtatgtacttcatctaagagaatcattgttgaaaaatctcattatgaggaagtattacacacgcttaagaatatcttttctagtcttaaagctggcgatccacttgaagctgatacgactttgccaccaatgaattccgaacgtgccaaggaaaaattagaagctcaggttaaaaaggccgttgatgcaggagccaagattttttaccaatatccagagattgattctaaaggtgccttcttcagacctgtaattttgactaacatcgacaaagaaaatcctatttacgatgaagaattatttggcactgtagcagaagtctttgtagttgacgatgatgacgatgccattcagcttgcaaatgattctagctatggcttaggttcatctgttatctctaacgatatcgaacgtgctcaaaacgtggccgctcaaattgaaactggtatgactgtcatcaacggccgttggattacttctggtgaattgccatttggcggtgtgaagaagtccggctatggccgtgaattgagcgaattaggcatgatggcttttgttaacgaacacttagtaattgatgttactaaaaataatcaatagtaattttgggtaaaacaaatacgctggcaactggcacaccagcgtatttttattgctcatttttagttttatttttcttaaacagattataaccagctaaaatcgtggttaacacgctagccaaaatcataaagtaagctgaagctccaagggaaactgcatatgacataagttgactggttaattgagccagcaccccagttgaagcacctactgcgcttgatatttggaaaactatataaatcaaaaagactgattcaatcaaagaaaggaaaaagaccaaagtttggctagccttagtatttttcaagacattataaataatgaaaatcgggaacaagaataataacagccaaacaacgtaaagaatgagtgcataccatgatgttgcgccagatgaaagtaaacgtcctgctaaactgaacaatacgttagaaatagacattctctgagtataaaatgaggcacccgaatcagtaaagagaacaattaaactgactagcgctgtcaaaatgaccgaaatctgcacgtaattgaagtggtgcttgcgaccatcttttatttcacgcacacgattttctacccgcggatgcttttgaacaaactctcggtttttctctttaactttgcttccacgagcatcaactcgattaaaaacttcagagccgattcgatcaatcttttgcgtcaaccgtttatcaaccgtatactgctcgatcttatctttacgatcacacacaatataaagccaaaccattaaagctaaaaagctggtccaccctgctgctctagagaaactcattagaattaagagcaaaacgcccaataagaaaactaaagtagcattttttctaacccatgcaatcattctctggacagtagagttttgcttttcaggaataaattcttcccgataggctgcacggctgataatcttttcgccttcatctgtttcttcaaactttgctttttggtgctgatctgtgaaaaagtcgtctcgatatttttttagattgaagccacagtttggacaaacatcatctgtttcactaatttcatggccacaatttggacaagtagtcatataagaattcccttctttttcaatatgttaatgattattataacatggatcgaaatttgagaaataaaacaaaaaagaccgaacccttacgatttgtactgagacgtaaaaagtagacaattaaaatattggattaatagaggcttgacttcgatactctttcggggttaagccttttaatctgctctttatcctttcgttgttatagtattcgatatattcctcgattgcttgagttaattcttgaagattatgatacttgtattcttgatcatagaacatttcagttttgagcaggccaaagaagttctccattagcccatcatccatggagttgccctttctggacatgctttgagtaataccatggagttttaaagctcgctgataacgagggctttgatactgacagccctgatcagtatgaaaaatgcagttattaagagctgtttctttggcaaaagccttgtcaagcattgtcattactaaatccatatctggatgtttggagatagtataagaaactatatcgccaccgcagccgtctagaataggcgataaataaagcttttcattattaagatgaaattcagtgatatcagtataccattttgtgttaggcagggctgcgaagaaatcacgatgaattaaatttggagctattttgccaatagtacctttatagcttgaatatttgcgcttattgcgcctgatgcctttaagacctaatttatgcatccaatagcgaacggttttctccgtaactttccagccctctctgattaactgcaaagctactctgcgatatccatagcggccttgatgatgattaaaaatctcatggattctagcaataagctttgaccgtttaggcttgacgggctgtcgtttgataatcttgtagtatgagcttctggcaattataggtagctcagggtgctctgcaatcgcagctaatacataatttaaactaactttgaattcttgccttagatccgtaatcaccctagctatttcttctgatcttcttggtccaaggcacttagtttttttacgtattcgttcacaatacgcaatcgcaagttttcttctttcagctgctggatctctttctccagttccttgcgagatttctgcttttctttggtcacgggcagggcgtcctttctgtttgataatgacattatacccgtttttcttatattctctaatccaattgttaagcatgccaatacttttaaaccccagttccaaagacagctgtaagtatggtttattgccaaagattgcttgttcaatagttcgctgcttaaactctttggaatagctttggtttttagtagttaaaatttctattccatgcatatcaattaatctaagcatatagtctaaattagctagattcattctgtacgctttagccaattgactgattgagatattttcatctttccatttatgataaatttctattttttgttctttattaaatttagacatagtaaacattctaagctaaatagtgaattagttatccgacgggataattgattcactatttttattcttttgtagaattaaagtagtggtaaaacgatatgccctgaggtctttagacacttgatgtcgcataataaactggcagttttacttaagttttcaatagtctcttcgaagaatgtggacactagatgtcgagtttagaaaattagatctgatttcttaagtaaatacgttttactactaagttttggaggtttttattatgcaagttacttttggaattgatgtaagcaagtctacttctactgtttgtgaactaattggtgaaagcaaaaatgaactaaccattactaataatcgtcctggttttattcaattgcttcatgaattaaccgctttttctaaacatccgcaaattatttttgaagctaccggtgtttattcacgcagactgcaggcttttcttgaagactacggctatgaatatgttgttattaatccgcttaaagccaaaaaagagatgaatatggggctacgctacaacaagaccgataaaactgatgcttatcatttagctttaattcaaagactttatcgccatccggttaatcaaagcgaatcccaaacttataagcagcttaatgctttgagccacttctatgaccagctgacaagtgacttggtaatagctaaaaatcgacttcaccaagctctacaatcgacttttcctgaaattgaaaatttattttcttctgctagaggtaaaaattactggcaaatagttgtgcgatatcctcattgtgacttagtaagaagagaagataaaaaacagcttattaactggttaatgagcttaaaggggattgcttttaaacacgctctaaggactgcagataaattaattgaattagcttatcaagcttatccagttgtatcttgctctagcatagaagtcgagcaagtgcagtattatgcacacagattgcttaatttaagtgatcaaagagaaaatttaatcgcaagaatggttaagttagcgaagtctttgcctaatcatgatttagaaaacctagaaagcattccaggctttgcacagaccactgctgtcagagttttagcagagttaggagatttacgcagatttagtaatcctaataaaatcaatgcttttatcggaattgatccaggcagatatcagtcaggagaaatggactctaatttaagtattactaaacatggcaatgcagtcgcacgtaagttgctttatcgagctattggacaaattgataatgcagctaagacaaatccgtgtcatatagcagattattatgaaagcaaaaagctatcctctcaaaccaaagggttcaaaaagatagctattgcttcaattcataaactaatcagaaccatttatgccctgattatcaatgatcaaccatatgattacaacgtagccacacataatcaaaaagactttagtcgtaattaattgatcaagtacattataacgctaagcccaaaaatcagatatggatctgggcttatttgtcgtgtctaactaaaaaaataaatcgacactaaaagatgtttaagttgaaatttaaacaaaaaatgaagccaaacttcttattatgcttgactttacgtagaaaaagacctaaaagtgtctaacttttaggtctcagttcaattcgatctgaaaaactatttattaattatttttcttttttcttcttttggcaaacttattaaggtcaattccctcatatgtcaatttagtagctgctgacatagtaattggcaaaatgaagaccaagatgagcaaaccaatatccacggctaaggcaacttcaatcaaagttggaatacctgatggaatcaaggctgcaaaagtaccacctaagataattgcggctgaaacaacaaccgtaccaatgatggcacatgccttcaagattcttgaacttggagtagtgtagccttcagactcaagttcacgataacgagtcatcaggaagatactgtagtcaacacccaaagcgatcaacataatgaagctgaagaatggtgtgttccaagtaagcattgacttaccaagaactgctttaacaatccattgattgattgaaagtgagcagaggtaagcaataagcaaagtcccaagaatgtagattggttgcaaaagtgaacgagttacaaacatcaaggcaatgccgataccgattaacatgatggcagcagttctaaggaagtcgccactggcaactgtcttagtatcttcaatcttggaactttgaccacccatagctaccttagcattcttcaaagcagtaccttggaatgacttcttagccatagcacttaattcttgtgacttcttagtagcttcggttgcacttgggtttgaatcaaagacaacaataatttgagctgacttcttgtctgggctgaggtaaacatccattgacttcttgaacatatcgttcttcaagaattccttagggatgtagaaagtatcagcggcagctgatgaacctaaacctctgaggtaggtttcaccttgacctaaaccactattaacagtgtcaatacctgaagtcaattgtggaactttgcttgccaacttaccagcgccagcactgagttgtccagcacctgtgttaagttgactgatacctgaaataagttgtggagcttgaccagctaattggccgataccactattaagctgaccggcaccagtggcaagagtacctaagccattattcaaagttccagcaccatttgcaagagtgccaagaccattgttcaacgtacctgcaccgcttgcaagagtaccaagaccattatttaatcggctggcaccattattaacttggtttacacctgcaccaaggcgactagcacctgatgaaagtgaaccaaggccgttactcaattgaccagcaccgttattaagcttttgtgcaccagctacaccttgtgaagcagcagattgaacttgagttaagcctgaacttaattggttcaaagctgttgctgcacctggaagagccttgtttgaagcttgagctaaagcattaacctgagcctttaaagtttgaagctgagtcatcaagttactttgttgcattgcagccattgagctttgcaagccctgagctgctgaagtagcatttgccattgctgacttcatcttatcagtattagcacctgattgagccttttgaacaacagattcaaccgcttgagtggcagccttagttgctgctgcttgagccgcttgtctttgatcagctggtactgattgcacagctgatgaaacagccaatgaaattgctgattgaatttcagattgatttactgaacttgagccagcattacctgctgcactttgcaattctttcaagctattttcaagatctgcagcttgtttttgaactgtagctaaactattagttaacgatgaagtatcaaccccaccaccaatagcttgattcaactgttgaataccgctattgatttgtggcaaagcagttttaagttgggcaagttgttgcttgtttgaaccactcaattgagttgaaagttgtgaactcaattgttgcaattggttaaccatttgttgggtaccactttgcaaactgttagcaccatttttcaaacgatttgcaccgctaactaagctggttgcaccactttgcaatgcatgagtaccactttctaaacgacctgcaccagtttgtaaacgaacagcgccgctttgcaattggctagcgccactgcgtaaacgatcagcaccactaactagttgacctgaaccactttgcaggcgagttgcaccactttgcaattgactagcaccgttttgcaaacgattagtaccactaactaattggctagcgccactttgaagacgactggtaccgttttgaagttgatcagcaccatcttttaagctgttagcaccgttagcaaccttgtttgagcctttgctcaatttacccaaacctgaacgagcttgatcaacaccgtcgttaaccgtgtttaattgattgttgacataaagcatatcaattggttcgccgtaaggttctgtaacagatgtcgcaaatgaaacatcttttgaagcttgaagttgcttagtcacttgatcaattaacttcaaattttcttcattgtctaatctatgcttgctttgaatgtacaagtatgatggttcagccatccctttagagaagtgcttttgtactatcaacaaaccttgcttagatggaactgaatctgcaatttcatcagtgtcatcgtagttcaagtgacctgagtacattaacatgaatggcacaacaacaactgctaacacaaccaagtaaataattggatgcttcaatgtggcagatgaaataccatgccataacttgtcatcactttcaccagtaaatttcttaactggccagaacatcttcttaccaagcgtagccatgaagaatgggttgagtgttaaaagcactaccaataaaacagcaacgccgaccgcaacaccaacagctgattggtaaacggagaatttagctaaacttaaagcagtaaaaccaattaagatggatgaacctgagtaaagaattgttttaccagcattgcgcaaagcgtcatgcatggctttatacttgtccatcccttttcctagattttctttaaacttgtcatacagcaaaatgttgtagtcggtaccgataccaaagagcacgataaccataaacacttgcgtaaagtttgaaaatgggaaattggcgcttttaactaaattagtaacaattgagaaggaagtaaggaatgaaacaccaactgtcaacaatgaaataagtggaacaattggtgacttaaatacgataaccaaaacaataaagataaagacaactgtaatggcttcagtcttcttaattccttcttgaattgaagcggagaagtcgtgctgcaagacatccgcacccgttacataagtacgaagcccttgcgttttcgcggccttgttcatttcgttataaactttttcaatcgtaccatgactcttagccacattaaattgtgctacccaagtcgtgccatcttttgattgaagtttctttcttgtagcaatattggaatctggaagtaatgaatccttgattccgtacttgcctttatcattagtgaacttatcaagcgtattattaatagcctgtttatcggcattagttagcttgccactctttttgttaaaaacaagtgctactgcataagtgtttttctttttcgagccccaattgttctctattgactgtgccacattgctttgcacattacttggcaacgtaatgttagagtgatcattagtcagctgcgtaatgttaggcaaagcaacaacggaaataatcaatattaaaatccacgcaatcagttcgaaaacatggttcttcagaaatttctgcactttcctatttcctccctatttgttgtaaatcaggtactggttctacaagtcgtaaaatcatttcatgataattacgattagattcatcttctgtttcatctccaaaagacttcgatttatccaaaaaaacgtaccctaatacggcgccaattaaagcatgaaatgaaatgacactttcttttttaaaattaagtctttcacccattttaattaaatccaagatttcttgattgatggccgcatcctttggatattcgttcaaatgatacagaatacttgataaagccggatcgcttaataaaaagtcgcgcacaacatccgcaaacttaagcaatgcatccctacctgacataccaattaaatcattcatcaactcatgacgtaggatcttaatccgtcttgcaccaactagtgatagcaattgtttgcgtccggaaacgtaatgataaagcgactgtgagcggacatcgagcgccttagccaatgctggcaaagttgtagctgtcagtccttttttagaaattaattcagtagcttgatcaattattttatccagatcaagatttcttttctgtgccattttcatccctcctttgtcttagcatagtaaataatatacacctacagtgtgaagattacaatctacatagtgtaaataatttattttttctataaaaaaataatgaagccttctcggacttcatcatttccgttacttatgcttttttataaaccaaccattaaccgttttgcccaatttattaaaattcttgtgttgcgtgctccaaacagacatacagtaagcacgtccgttagtctgtacaattgcgacagcaaaatcatcatcaccaattgcataaatgccgccacttaagccagaaactaaacttggtcgctctttagctagggttgctaaaactcggctagcatattgccgatttaatatccgaccttgatacaagccaatcattgttttagctaaatcattagctgttgtctgaccagtcatatttgagttgaccttagtttgagtggcacccatttttttagcaacttggtcaatattattaactccaatttttctagttaaggcactagttgcagttttgttacctttaagcattgcgctgcgcaaataacttacaccataggtaataccaatttgaaacatcttatcacccttggctttgtcttttttgctaatcttaatcgcagttcgcgaccccatcttgcctttttgttcttgctcatacaaggcgatcagtaaaaataaccgcattgtttttcctgcgtcatgagccttattagtattagaaactacggcaaagtgactagagttagttaaatcctgtgctactacctggaagctatcatcaatgcccataacttttttgatttgcttgactagcttctgattactgcctttttgagctttaacatggttagaatattcaatcgaattaaccttgggttccttaggcttttctaattttttaacctttggttccttggtcttctttttattcttagcgaccttgctgttatttggttcaacaatctttaactgcgcgttttccacccgctttatgtttgatgtatacaaaatgaatgcaaataaagtcacaattaaagaaccaattaatattttatgtttcattaaaacgcctcaattttagaagaaatgatgccttttcatcaaaatgactaaccaaaccattaaaacaaccatcaaaataatgattaaaacccagtcaaatgaattttttaaaattggtagactaacattcatcccataaaaaccggttaaaatagttggaatagttaataccaatgaccacacagttaagaattgcatggtgtcattcaaattattgttcatcatattattactggtagctgataaagtcttagttacctgctgggaaatctgcaccatttctgcagactggcttgattcaatcaggacgtcatccaagcgttcactggcttctttagtgaagtctaatttgctgtgattcaggccatgcaacatgattaaatccgtctgaattgaacttgataaataaactaaacttttttcaatattcgaaagttccaccaaatctttattgttaatgtcatcagacaacttctgatctaggctgttacgttcaacgtcaagttgcgttacggcacgctggaagtattgtgatgaatataggaaaaagagcatcaacaactcagtaacatctttagcttcagacaaacgctcccgcatatgttcatcgttgaattcatcaaacacatagctggttgattctgtatggaaagtaaagatattttcacccactactaaaaaagtgattgggtgtgaggtaaagtgcttaatcgtgttggtcggccaaattggcacatcgtaaacaagcaagtggctcttagtatggacgtcatagtcatagtgaggacgttcgtgacggtcagaaatataagagataatgtcaggcgtaaaattaaaatcctgctgcaatctctcactgtcttcttcacttaaattattgatgtcataccacttatactttgttcttaccggaaaattttgttgtctaatcaaccagctcacctcaacttttattttattacctagtaaatggtaccatttttctcaattctttttccacaaaaaaacagaccttacggtctgctctttgaaatctaattgctatttaattttattgcttccaagcagcatcaaatttttgcttaccagtattaatttggctgttagtattttgacccttttgggctgcagcaaagatattttgcaaaatgctgttcaattggttgtatgcagcatttgaattcttagcaacaggaacactgtacaagttcttcatagcatcttcaagtttagcaggaagcttgatgctcttgttattcttgtattcactagattcgattgcactattgtttacaggaatgtaaccagtagcattagcccacttaatttggcttgacttagatactaagaacttaatgtacttaaatgcagcagctttttgttcagcgctagcgtggttaaacatgtaaatatcagtaccttgttgcatggtgtatttgccaggacgtggagcaacatcataagtaaacttgttacctacaccttgcttaacaaagccttcacctgcagaagtaccaacaaacattgcaaccttttcgttagcaaatggacctgaaaggtagtgttctgaaccagctactctgaagtaacccttcttaataccatctgcatagaagttgagaactttctttgaagttgaaccactgaagttaatcttatcagtaaagttcacgccttcgtccttcataccaagagtgtagtagttggataatgaatcaaaaccagcacctacaactttgtggttactcttcttgtagatagtttctgaaacatccttaagttcttccatagtagttggaactttcttgatgccatatttcttaaacatggtcttgttgtaagtcaaagtttcaattgacttgttaaatgggataccgtattgagttcccttaatttttgcaccatcaagaagttcagttctaatgtcagatgcctttgcactgccccaaccaacattcttgttgttgatatatggggtcatgtttacaagcatcttgttttgagctgcgttccaaagccaacctggataagcttgagtaatagtaggtaagttatttggtgattgcaaagttgagttgatcttagcttgcaaatcattgtatgcaccttggttttcaagcttaacagtaattttagggttcttcttttcaaattcattagttaattgctttaaagtagaaccttgtactcccggcatagcgttccagaagacaactgtagtcttcttagtaatctttgatggaatcttctctgaacttgatgaagaagaattgccgctctttgaacaagcagcagtgccaactagggccaaagtagcaacggcagccatagtaagtttcttactaaacttcatttggataaatcctcccaaaaaataaaactaaacaacaatatatttttgatttactaaagcgtgattgtttgaccacgtttaggtaaaatccgttctccatatgggttctcttccagctccggatgcaatgtgtgcaccggtactaaaacagctggttgaaccccagcaatgatttccttgagttctttttcatcggcatggcctgaacagcgcaacgccttatactcaatatcattgttagctaaagcctctacaaatggtttgtaggcaggatcaaaatcccctaatggctcagcatttgagtggatatacaaaccacccttttgcagcttatcataatcggtgacaacttgccacatgtatttatgattatctgctaaaagctcatcatagctaacttctagctctggcttaaggtcagcatagtgctcctcattaggcatgtaatagtaaggatagtcttcatccaaactttccttaatcaaatgggcacgctgagcatgtaaaacgacctttcttggtgaatcggcaatgattcgcaataatcgttcaacattagtaggataagtattaaaagtgatttggcgttcaggattagccttttgcaggcgcacgatttcttcagttagttctacttcattcttagggccagtaaactcttcactgttttcatcatgcttttcttctggccaagaaacgccagtgccttcaataatcagcatatcgctatttttagctgcctgcataaagtcccgcacccaatctggatgataaccatgcaagcgaatgtcgccagtataggcgatttgcttatccggtgtcttaactaatagaccagtagcaccgtaagcgtcatgatcactaggatatatttccaggataatatcgcccaccttaattggtttcttgtattctgccgcgatgattggacgagtataagtccgatcatgacctgcagcaggaagcaagaagtcgcccttttcattcaaggctggcaataaatgagctgtaattggacctgcataaagtggaatttctggggccaaaaagttcattgccttactgtgatccaaatgtaggtgcgaaatataggccgccgcatgctcccagcggtcagtatcaattggcttacccgttaatttaggatcgtaaaaattaggcacatccccgattaatttatttttaatcagagtttgataactttcatctggcaattttaactctggccgataaacttccccaagtcaaacaatacatgcgacttgttataggccacttcaatcatcggtccaccaattgtggttaaaccattataaaaagttactgtcgttttatcctttaaggtcattgcgcactactcctcgaataatttgctttctaaagatgaagtacaaaatcaagattggcaaaacagtcaatgtggcagcagcaagttgaagttgagtttcactacctgcatcagatgcaaatgaagttaaaccattgttcaacaatctcatgctgtcttcgttagttaccaataatggccagaggaatgaattccaaccagaaatgaaacttaataaagcaacggtgaacaagccacctttagacattggcaccaaaattttccaaatatattcccaatcactcgctccgtcaatcatcgcagctttataaattgtctgtgagattgaaccgaagtagctttgcaagtagtacatgtagaaaattgaagttaaaaatggcaataccaaaccaatataagtgttcaacaagcccattctggcaatggtattgtagttagtaaagataatcgcttcacctggcaccatcaataacgataaaagtaccatttgaacaacgcctttacccttgaacttcaagttaaccatggcaaaagcaccaagcaaggcgttaaacaaacttacaattgtcgttacactagctgtgataaaagtgtttaggaagtaacgagcaaatggagcttgggcgaatactttggcatagtttgaccattcaaaatgcttaggaatgattgttggtggaatagtggttgtttctctaaaactcattaatccacccaaaatcatgtagatgaatggaaagacagtaatgattgcgaaaatcgctaaaataatataagcaatcaaagtaccccaacgaatcttcttcatcctttactgtcctccaatcttcttcatcatcttgcgttgcaagaatgtgacaaacataatgatgataaataagacaaccgttgcggccatcgctacacctggagtaccaacaatttggaacttgttatagatgtagaacactgcagttgtagctgagttaccaacacctgcttgtccattgaataaggcataaacagatgtataaatcttaaatgcagcaatgatattcattgttaataagaaggcgatcgttggcacaagctgcggcattgtaatacgccagaacttttcagtaccagttgcgccatacatatccgcaattgtgtagtaattagggtcaatgtttttcaaagcccccatcaagataacgatgttaaaagctaaagaagtccaaacaccaaagatgataattgtcgtcaatgacatcgctggatcatcaatccagttcggtgttggtaagtgaaccgccttgagcaagaagttaagcaaaccatagtcaccgttaaaaatataacggaatacgataccaatagcgatagttgacgtaacatatggcataaagaaagtcgtttcaaagaatgacttatgctttatcctgctgaaaataaaccaggccaacatgattgaaatagccaaagcaactggcacagaaattagggcatacaaaatagtattcttgattgcccgccaaaattctggatcactaaagatatattgataattgctgaagccgctccaattcagattaattaacgagccgctttgaaaactcattacaaaggcccgcaaaattggataaatactaaagaaagtaacaaagataattgttggcgctaaaaagagccacgcctttttctgattgctcttcattagtagacacgctctccttccttagtaaacaggaatactcgatcaagacgcatcttcaaattgatattattaccaggcttaattggtgtctcaaggttgactaatgaacgagcttgtaccccatcatgggtaaacttcaaaattcgttcacgaccgattaattcgatatcatcaactttagctgaaactgcaccatcttcttcaactggcaaaatattttctggacgaacggataaaacgtactcgccgtcagttaagtcacgtttaaaacgatccttgtctaaatcgtccacgttaatttcaaaatctgagccagtaatcttgccgccattaacctttacattaaagttatcaatcacaggattaccaccaaaattagcaacaaagtagttattgggttcaagatagaagttttgtcctaagtcatcttgttggatcacaccattattaaagagaataatcttatcaccgattgacaaggcttcttcttgatcgtgagtaacaaacaaggtggtaatacccacacttttaactaaagcacgaatttcttcacgaatcttcaaccgtaaacgtgcatccaagttactcaatggttcatccatcagcagaatcttaggttgttgcactaaagcacgagcaatagctacacgctgctgttgaccaccagataaattgcccggcttttgatcagcaagttcggtaatctgggtcgttgccatatatttttcagcaatcttcctcgcctcatccttaggcatcttttgcttgcccacagtcagaggaaacattacattctgaagtacagtcatatgtggatataaggcatagttctggaaaacatagccgatctgacgatccttaggtgctacgttaacaactgacttgccatcaaaaaggatgtcaccgctagttggattaagcaaaccagctagcatatttaagatggttgttttaccacaaccagatgggccaagcaaacatacaaggtcacctttttttacggaaaagctaacatccttgattgcttcatgaccgttatcataaacctttttgaggttctttacttccacgaatttctcatcattcataagtttcacgcaccactatatattgatttaaatttttaaatttctctattaattctaagctaaatatacgaaaataacaaataattttcatttgaaattcggggtttcaacgactttgtgaaatgcttctcagcaagtattcggcttttgttcgcatttacttttatttttcacttatttctttttgaaaattcgggtttactaaatattgtggtaggtaccaaaaaagccatgaattagtcatggctttttgtatcataagttatctccacgttcaaattgatattttgaactattcaaggcttgacgaaccaacttgctcatcaagttcttagtctttttggtaatcacaccagcagtttcatcattagcgctagttaaatatttaataagctctctgccttccatatttttagctttttcatcaataagatcaattcggccaataccgtagctttgacaatcatcacggtaggcgtttacctcataaatatattgatgatagcgtggttcaacaagcacttgtaaagttttatacaaccagtaagcactactatctggatcaaccatatgatctgccaccttatagttaagtggtgtatcctcaatattggtgtagaaaggaacatatggtgaatatgcataaaagcccatattaatccattgaattgcagccatcttggcaggaacatcatttctaatttgcaagatgcttgattcctggtttctgtctaaagcaatagaacggaacatcttttgttctttttctgaaccagatgaaaaagtgtccattggatcgtatggtgtaccgttatagtgactagttaaaaatctttgtacatcttcaacaccaatcttattttcgggaacgcgcgtaaatggcatttcttgactagttgggtcttgttcaatgcttggattaaacaacttctgtccataccaagttcttggagtattgtaaaaagcatcagcttcatccttagtaccaaaaatatctctgaaagaaaagctaccgtcagtactattgtttaaatgattcttttctacgaattctcgaataccagctgaatacataaagttatctggatcatcaaagtcaacattttgaatcaccatgatgttaggacaaattgcgtaagaatcatcaggaacacgagccgcaacccattggtgacccgcgccagtttccagataccaaacttccttgttgtctgaaaaggcaataccgttgctttcaccggtaccatatttttcgattaattgccctaagcgcttaacaccttcacgagcagtcttcacgaatggcaaagtaatataaaccattgagtcttcgttgattccatttgctactaaaggatcatgtcctaagcagcgagcattagtagcttcagtttcagtggctgacatggcaacgttatattcgttaatgccttgctcgtcccagcgaccttctgaatcatcagcagtagggacagcagtccatttgcagccatcgccctcaaggtgcatcttaaagccgttatattttgatacataatcttcatcataatgacgggctgggtttaccacaaaaactttttcgttaatgccaccataaccgtcttcgtcacgcgcaatcatggttgatccatcgattgaagcgtccttaccaactagcattgcagtacagttatcttttttcattattgtttgtacttccttttttatttcagtaataatttttcatattattaattctactactcattaacctgcatttgccgatcaacttttgctcgaccgttattatagttaaaaacataaccgggctgcacgttatagagatagacattgaagtttaaactgccatcagttgaaacggcctgcaaattcacgccgcgggccattaactcattaccacgaaaaacagcagttgcttgataaattacacgcttattctgccgcagtgctctcctaaccttagcctcaaaaatagtctgaatcttttggttagaataagcggattgcgtaaacagattcttaggattattttggtcccctgattgattgcgtggatcataattgccgctttgatcaattccagctgagactgaataggcaatcaagtggccccgattatagatttgggtaccgttacggtgattatagtgccagccagtcggttcaacatattgccttactcgcaagctatcattagccacattgcgcttttccaaaaaggctgtattagagcgcgatgttcgattcaatgaatcaaggttagagtaaatcacccgatttatcttccatgcgcctttgaccaaagtcgacttatcatggttgacttcggtataagcgcgactgccactcttaaaattcaaattagctaatttttgataatcagttggcgatagacctccataattggtcttggcttttgatgcatcgctaattgtattagttacatgttcatcattattgccagtaaagtcacgcaaaaactggctaccatttggatcgctgccagctttagtaaaaactccccataaaatcgcgattaagacaattaatgatgaaacaaccgttccttgtttttttcgtcttcttcgtgtcatctttttcctctaactacgagcccaatcatcaagcatgcttaagaaaaaggtctccgaaaaacgcttaatcttagcaccatttttgatcaaatcacgtgctgcattcaaatcctgattatcttttctaaagaaatcttgatcacccatgattaagtaattagtcgttgctaacactgaattgtcaacttggccgcccatattgttgatcatcttgcccgcttcagcttcgttcatatgaatattgccagacaaaacgatattcttattttgaaccggattgtgccaacctaagtcaacataatccaattcgccagtagttaggtcgatattcttaatcttgctttgtgccttttccaataaatcatcagtaaagtgctgggcaaagtcatcataaaccttgatcgtatcaagagaatcctgcaaaccgtggtgagcctcaacttgagcaattccagcccgctgcatgcagtcaagcagacggttatggcgctcgcgtggataatatgtccgcgccaaacgcaatacgtcaacgtaatcattatcaagcactggtaagccatatttttgacttaaatcatacaaaaagttcaagtcaaaattgacgttatacccaatgataacgtcatcaccaataaactcacgaaattcacgaatagcctgctcagccggaatcccttccttcacaatttgcgcttcagtaattccatttagcttagtaataaaagcaggaacagaattattcttggaaaacttcaccaaattagtatattgatcaacaatttgaccgttacgtaccttaaccccacctaattcagtaattcgatcgcggtaaggatataagcctgttgtttcaatatcaagcattgtataattggtcaaaaagtcaggcttttcctgtccttttttacgcaacttgtcttgcgcaccggttacatgtaaaattccattttttatgtaaatactcattcttcacctatttaattatttaatcaaattcatcagcatctcgtgcgaattgctatcaaaacccattgctcgtttcttaagatcagctggcaaatctgcatcagctaaatcagcggcaatataatgccaattaggaaattgctgcactagctttaccattggatcaagtaattgaggactggtctcatctacgcctaattccaaaattacgacattcttgtcctcggctcccgttagaaaccaacgaaaacgcgtattagcatcggtatcagggaagaagttagcattcagcggcatatgcaattccattggactattgcagtcctcgcactttggtactaaatctgccgttacgttgccgttcttaattgccgtcataaagcgttctactacttcacggttatccttttgaccatgattaatcccgctagaacactgcattttagtccaatcaccaaaggcattgaaaattcgattttcattaaagcctgcattttcaaaaaagtgcccgaatgtactggtcgcaataaaatattttttatcacgaattagcttttttagagcaagcatcgtctcactaggctcatattgtaaggaatattcgttgattagctcactcccaaaagcccattgctcgctccaagtatcaaacctcttatctaatgcatccccaattgtatgcacatcatacttatctgcaattttgccaaattgatcatcaaagccttcttcacttaggatatctagtccctcttctttggccatgccattaccagccgttacgatcaccgtgttagcatttttcagccatttttttgctgtcactaaatctgccattttatctctttccctttgaataacctgtcaagcgtaattgtccattaatgtattctcctaagaaaacatcactgatactattataacctgcctcttcaacttgttgctgtaaccaagcttcgcttttgtgaatcaactctaagacatcaatattagcctgaccatcactaattattgggaaacgaatgttagcttcatcattttcaataatagttaattgcccgttttgctcaaagatacaattcttaatcttttcaacagagtagatacctcgactgcgcaatttaaacattaattcattagcggagattcctgctttcatgcagtttcccactaacaccttgccatttttaattacttgaacaggtttaccatcgataatccctctaatccaattattgtgatcacggctgaatttcaaaataaaaacaaccaacgtccaaacaattagaactaggaaaaactgaagaattgtaatactaggattgtaaatcaagccaccaataattccacctaaaacataattctgcaactgatctaatgcagtcgtaggagccagattagacttaccaaagacattgatttgaatgattaaagttaagataccgagagcaaacttaatgaataattgtgtgtaatctagctgcattattttattacctctactttatgatcaattacatgggcttgcgttaatgtgtaagtattgcgatcatcattaaggtttaactgataatcaatatttttagaatcaatccttacgatcatgccattagttaaaaccgttgaactaactaaaacatcagaagtcgaaacattttcatctttagcaatcgatttgatgaatggcacgatttgaatcgcctgtgatttttgcgtattaagttgcacatatttttcatattgcgtaccggcaaacaaaagcaaaaataataaggcaataatacccaaatcgcgatacttggttgcaaaacggttatgtaaatatagcaaagcaaaaattatcattgctaacgccgagactgtcaagaagtttgtgtaaataatctctctcgttgattgacttttttatttatcttttaatcaaaataggattctagggtgtctcgaacttgcccaaatcctttatgaatcctgttaaagtaacggtcattgtaatccattgcctgaactccaataaaggtgtcaagcgactgctcagttggaaattctgttttaggcttggttttccgcttaagcctgttgttaaaggattcaatcatgttagttgagtaaattgaagctctaatagctggcggatagttgtaaaaggttaacagatcaggctcaacctgtctaagatctctaactacgtttttgtaggctttttcccagttttgatagaattcatgcagcacctgtacagccatttctttgtttgactgagtatgaatctgcttgaattcatccagtgctttttttcgatcgtcaacccgcattttggcactgatattacgcatgacgtgtaccaagcagcgttgaaaatgcgctttaggataggactggcagatagcctctttcatgccaactactccgtcagacaagaagagctctacctgttcaaggccgcgactcttgaagcctttgagcatttcgctccaaatctcaatattttcagtaggcgcaatacagtagtcaatcacttctttatgaccattaggtttgataccgatggcgatataaactgcttcgcgctcatgagtgacccgcttaagaggaatataggtggcatcgagataaacgcagaagaacttatctgacagatgtcgctgatgatatgcctcaactttgggaatcatttctttagaaatattggaaaccatagctggagaataatagccgccatacattttctcaatcaaatcagcgatttctcgggttgtgacgcccttggaatagagcttgataacagtttgctctaaaacatcagtatgccttttataatctggcatagtgtgttgatgaaactcaacgtttctgtctctaggaactttgatttctatttgtccgaattgcgtatcaaccttgcggtaataagcaccatttctagaatttccggtattccagccatcgcgctcataaggattgtagcctaaaaaggcagtcaattcggattcaagcaggtcattgacagcctgttggagcttttgtctaaataaatcattaattttatcctgattgaatagagcattagccatatctttggtaaaatcattcatgaaggaatctcttttctagtatgtttttcgttcaaatcaatcatacgggaaaaggattcctttttctaatattcaggaaaataaaattaaggaaatattcatccttacacaaactattttacagtctcctaacgccgccaccaacatcaaagcatataatactgcctgattagtattctggttattttgaatatatttcattgtataaaaggtcatgctctacctcacccttcatatttttctttcattctaacacagaaaaaaagtagcactttcgtactacttttactagaaattattcacttttcactattattaattatttttgaatttcttttaatccagctttgcgacggcccatgttaaaccatggtgaaacagtgaaggctaacacatcattaattacatagatcaatgaattaattgccatggctaagtttgcatcaccttgagcataagttacgcccaaaagaatcaactggaagacgccactagcagtccaccaaaagtattgattgttgtaacgcataaagcacatgatcccagcagttaatgaaatagcaaaactaatagcatcaatccaaggacgaggatcattggtaaatttaccaatcaaaaagccggatacaacataaacaagtaaagtaccaacaatagcaacaagccattcctttgaaccgaattttcttaagtgattcttagtgtcatcattccatgatctaacagcaataataactggtaaatctaaagttgcaatataagcaatctgttcaaaaatggaaagataattcttagctgaccaacctgcatagataaaacaagcagctgaaatcaaccccaaccaaccattaattgctttagtagcgttaattgccaatacacaaagtgtacccaaaagcgtaccaataaaagtaatcaaagttacgcttgtaattttgccttgaatcagcaaagctaattgaaatccaaacgcaaaaaaccataaacagtaattttgaactggccagcctttcaattgattaaatagccaaacaaaataattttcgtgttttctttccattgtactgagacgtaaaaagtagacaattaaaatattggattaatagaggcttgacttcgatactctttcggggttaagccttttaatctgctctttatcctttcgttgttatagtattcgatatattcctcgattgcttgagttaattcttgaagattatgatacttgtattcttgatcatagaacatttcagttttgagcaggccaaagaagttctccattagcccatcatccatggagttgccctttctggacatgctttgagtaataccatggagttttaaagctcgctgataacgagggctttgatactgacagccctgatcagtatgaaaaatgcagttattaagagctgtttctttggcaaaagccttgtcaagcattgtcattactaaatccatatctggatgtttggagatagtataagaaactatatcgccaccgcagccgtctagaataggcgataagtaaagcttttcattattaagatgaaattcagtgatatcagtataccattttgtgttaggcagggctgcgaagaaatcacgatgaattaaatttggagctattttgccaatagtacctttatagcttgaatatttgcgcttattgcgcctgatgcctttaagacctaatttatgcatccaatagcgaacggttttctccgtaactttccagccctctctgattaactgcaaagctactctgcgatatccatagcggccttgatgatgattaaaaatctcatggattctagcaataagctttgaccgtttaggcttgacgggctgtcgtttgataatcttgtagtatgagcttctggcaattataggtagctcagggtgctctgcaatcgcagctaatacataatttaaactaactttgaattcttgccttagatccgtaatcaccctagctatttcttctgatcttcttggtccaaggcacttagtttttttacgtattcgttcacaatacgcaatcgcaagttttcttctttcagctgctggatctctttctccagttccttgcgagatttctgcttttctttggtcacgggcagggcgtcctttctgtttgataatgacattatacccgtttttcttatattctctaatccaattgttaagcatgccaatacttttaaaccccagttccaaagacagctgtaagtatggtttattgccaaagattgcttgttcaatagttcgctgcttaaactctttggaatagctttggtttttagtagttaaaatttctattccatgcatatcaattaatctaagcatatagtctaaattagctagattcattctgtacgctttagccaattgactgattgagatattttcatctttccatttatgataaatttctattttttgttctttattaaatttagacatagtaaacattctaagctaaatagtgaattagttatccgacgggataattgattcactatttttattcttttgtagaattaaagtagtggtaaaacgatatgccctgaggtctttagacacttgatgtcgcataataaactggcagttttacttaagttttcaatagtctcttcgaagaatgtggacactagatgtcgagtttagaaaattagatctgatttcttaagtaaatacgttttactactaagttttggaggtttttattatgcaagttacttttggaattgatgtaagcaagtctacttctactgtttgtgaactaattggtgaaagcaaaaatgaactaaccattactaataatcgtcctggttttattcaattgcttcatgaattaaccgctttttctaaacatccgcaaattatttttgaagctaccggtgtttattcacgcagactgcaggcttttcttgaagactacggctatgaatatgttgttattaatccgcttaaagccaaaaaagagatgaatatggggctacgctacaacaagaccgataaaactgatgcttatcatttagctttaattcaaagactttatcgccatccggttaatcaaagcgaatcccaaacttataagcagcttaatgctttgagccgcttctatgaccagctgacaagtgacttggtaatagctaaaaatcgacttcaccaagctctacaatcgacttttcctgaaattgaaaatttattttcttctgctagaggtaaaaattactggcaaatagttgtgcgatatcctcattgtgacttagtaagaagagaagataaaaaacagcttattaactggttaatgagcttaaaggggattgcttttaaacacgctctaaggactgcagataaattaattgaattagcttatcaagcttatccagttgtatcttgctctagcatagaagtcgagcaagtgcagtattatgcacacagattgcttaatttaagtgatcaaagagaaaatttaatcgcaagaatggttaagttagcgaagtctttgcctaatcatgatttagaaaacctagaaagcattccaggctttgcacagaccactgctgtcagagttttagcagagttaggagatttacgcagatttagtaatcctaataaaatcaatgcttttatcggaattgatccaggcagatatcagtcaggagaaatggactctaatttaagtattactaaacatggcaatgcagtcgcacgtaagttgctttatcgagctattggacaaattgataatgcagctaagacaaatccgtgtcatatagcagattattatgaaagcaaaaagctatcctctcaaaccaaagggttcaaaaagatagctattgcttcaattcataaactaatcagaaccatttatgccctgattatcaatgatcaaccatatgattacaacgtagccacacataatcaaaaagactttagtcgtaattaattgatcaagtacattataacgctaagcccaaaaatcagatatggatctgggcttatttgtcgtgtctaactaaaaaaataaatcgacactaaaagatgtttaagttgaaatttaaacaaaaaatgaagccaaacttcttattatgcttgactttacgtagaaaaagacctaaaagtgtctaacttttaggtctcagttcacatcctattcaacattccccttttttattttaggttgcaaaatacaagatcttgtgccttatccgtgctatgtaaaaaaaacatcgatatctagtatagtggaccattaattaaatacaagaattgacatttttaatttttgcgttaataacatatttctatttccgtttatcaagcaaacatttattaattttttctaaacagcaaaaaaattttgttccttttagtgacacagtgtcatatgatatatacgtgattattaatttatatttttatggaggtacactcatgtttaaaactaagaaaacgcaatttgctatccgaaaattagcacaaggcgcctcagcagttttactttgcttcggcatattgggcggagcaagtgcacctatcgttccagctgcaactacagatgacccaacaaaaacagtcactgaaagtacaattaatagtgagaatacttctttcaatattgaaaccaccaccaatgcatctgataaattcgcttccatcagcaaaaatggggggtacaacggtagtgccaaattctgctgagccagtttctccggatcagtccattacagaaaatgataatcagcaagaaaaaactactgtagagaattctactgagatatctgagcctgtcaaagacatcaataagtttgataatgatgccaatgttgataaagacgaaacaatcactgtaaaaaagccaacaattaatgtcgacactgaaaaggtagaacaaggcgatgaaacagagaaaagtaaactcgaagaaattaaaaagtatattgaggacgtagccgcaaaacatccattaggcattgccggaattttccacctttttggtaacgaaatagatggatctgctcatattgcaggaaatgtcgcaacagacaaattaagtgctggcaacttcggtactatccaagatgccactagtaacttgactacttgtgatattcattacatcggcagtattgatcatttgaatcagattgatggcgaaaataaactagttatttttggtccagatgttgaatataaatcatacgaaaatggtagttccattcaggtaaaaataaatggaaattggcaaaaagtaggaattccatacaacaaaactatcagagctgaccaaattctagatattcaaggcgaactagataaattaagcgataaatcagacgaatgggctaagcaaacgcaaaccgaaggcgtaattgctgatttcaaggagggtaaatagttggatcgacgtttctaatgctatcaaggatggcagcaaagatcctatttatgtaactattgatgcaaaatacctttcaggcaataacaagcatgaaattgctattaaaggcatccctgcagacgcagaaacaccaatcatcatcctaaatgtaactaatgttcaaaatggcgatttaaccgttagcacaagacttgttttggattattcagaccaaactagcatcaatggcgtaagtgaaaaaccatctcaacttaataagttattatggaattttggaacagatgttaaaaatttaactattgaaggagacttccatttaggtagtattttagctactaacgcacatattaccgctaacaaaaatgttgacggtaatatcattggtaacaaaatcactattaaaggtgaaactcaccgttgggacctaactccgccattagtagaagttgaaactccgccggaggatccaaaagatccacctaaagaccccgaaaagccagagaatccacctaaggatcctgaacctactcctgagcctgaaccggaactaaagcctgagcctactcctgatcctgaagaagagagtactcccccattaccagaagaagtaattcctccaactgataatgaaaattcctctgacttcaaggaagaggacactgctcctctaccagaatctgttgtagaaaaacaagttaaaaagaatcttccatccccttcaactactgaagaaaatattgcacctcatgctgcgactatcccaacctcaactataactgaaaaagaaacagttttacctcaaaccggtgaaagccaagacaagctaatgacgattggactcatcactactagcgttgcttcattgtttgcagtattaggcacagtaatcaaaaaaagaaattaattaaaaatgattcaattcaagccatttttattcttaaaataatctagaattaagtgaggattaaaccatgttaaaaaatagacaacaaattcttcctactaaggcaactaacactccaaaataccaattgcctatcaactattacgatcctgaaggcagcatggttggcacttattctggaattaacttggcggcaaatgaaactatcactcaccaccagctcaaaagatttatcaacatccatcttcccgaaaactacgaagtttttccttactttgcttatcctaaggagaatatcacctgtgaaaatctgcctgatgaaataatgatcacaatcagattatctaattaaaaaaggcgactcgattgagtcgcttttttcattgcaattgatattaatgttgcgaagcaccagttgtagtatctggttcttcgtgcttttcttctttaacttctgcagccttagttgaagcaccagttgcggcgtctggatcagaatttctacggtaagttgcaccagtagttgcatcatcatctactaccaatttttgaccagtagtctcacagaagtacttaactaatggatataagtctttgacccattcataaataccagcatagttaccttggtcgtcttctacacgcttataatagtccacaaccaacttcttcaaattgcctgttggtattggcatataaacatcatcatgacctgcttccttagtccgcaaagcatgaacaacttttttaacattcggaataacgtcacgaacatctgggtgaactgcgcgcatcgtatcacccacttgatctggcgtagctagcattttcttgttaggatcagttggacggttataccacaagaattggttattatcatcaacaaatgtcattttaccaatggtatttctcagcatccaattaagttggttaacagttaacagacctgcatcaagtttgacataatcgtcaccctccgcagcatgaacttttttagctgctttatctagccaatcaggatcatttttatcgattccctcaactgtatacttagacttaccctttgcatcgaaatcttcttttaagtattcatcggcattcatatctttaagccattttggttcagccatagtaagaccccctcgtatgaactttgttaatctaattatataatgtaagtggtttcaattcaacaattttaatatattttatataatatttttactagctggattatatattattttacgcgtggtgctagttaaatctttctagacaataagccaaattataagctaaaattgcaatttccaaccggctttgaaagcctatcagactacgtgctcgattgttctcggcattgtaataggtcagaagcgaaaagtcgctttcaattgttctgcgaatagccatcaattgatgatcattgcgctttttagctcctgtcatatttttacgatatggtgtccaaagttcataacccatttgttttagctgttgatgcagttctttgcctaaatagccttcgtcgccaagaagatagtaattagatggatgggtattttccagcagttcaactgtctccctggcatcatgaactgatgcttttgttacgacataatcaagaatgtaaccgtcatcgctaacaatgacatgaactttgaaaccatagaagtaaattttcttggtggccttataaccaatgttggcataaccgcgaaaaattttagcacgatagttgcgaattggttggcaaacaggtaccggaaagctgtcaatgatcaagaaatgtccattcaggtcaacctttttattcatttcttgccgtatctgataaatcaattgcaatagctgacgtgaacgccgattaaaacgtgagtgtgataaacaattgaaacattcacagaatcttctttgtgattcaattcctgtcttagcttgccagataagtaaagccaaaatcagactgtccgtagttttaatttgatcaatatttcgccgatgagtaaactcagccggtgcatacaaacgataccagtgccgacaaattatcactaaatctttaaaactaacttgtaaatggtggctaaaacgcttaagcttaaggcagttcaatcagatcagactcttttctattattactatttacaagtcgagtctaacaagattggacttttttattaactaaaacgatttaactagcaccctgcgtattattttatataaaaaaagctgatcaacgagcaactctttacatctttgtctcaattgtatgagtgtccaaatgaatgatcacgtcaaacatcgctttttcttctggtgaaatcttatgagccacctcaataacagcaatacgtggattcttcaacagcgtcttatgaatgcctaacgacaagttcgggtcaagcgcacttgtcgcttcatcagccagcaaaatcggccgatctgataaaagcgcgcgagcaatttctactctttgaatttgtccacccgacaagccactgccgttttcacctacagccttgtctagaccctgttcctttaccaattcatctagaccagcctcatgaataacttctttcaaatgctcgtcactcactttacgtcctaacgtaatgttgaaacgcaacgtgtcatcaaacatgaatggcttttggttaacataggaaaaataattatgggcagcatcccaatttcccgttacatccgtaccattgatcaaaattttaccgtctttgggctttctcaaacctaatagcaagcgaagcaaggtggtcttgccccaaccacttggcgccatcaatagaactttttcacccggcttaactgttaagttcacattctcaaagatgcgtttgtgatcactacctgtaacataagataattgttcaacctccataccatcaaaatgatcgatcttctgcttatcatctttcagcacgtgatgcaaagcgcgctgggtcttttcccacattggcacagtcgacttgacttggttaaattcgttaaaaagagtcacgattggcgtgataaagttcaaggccaaatcgaccatcattactaatgtacccacctttaaatttccctgcagcatcataataccgccaatagtacatggtacgatgaagcaaaacaattcagcagctgaataaattaattctagtgcccaagcttgagtcaacgtcatattacgcagagcgttctccattgcctgggccgcaccagctgctcgtgtaacgatgttggtgcgcacgttataaagcttggtagcctgtgccccatttaatgaatcggacacattttgcgtatagttagcgttagtcgttgcccaaatcttggacttacgtgtaatgataggactagtaatcatttgaactaatgctggcgcaagcgtagcaatcaaaaatactagggtcatctgccatgaactataaaaagcaaaagtaattgccccgaaaaacgacaaaccttggaaaatcatatccaattgtgccgttatccgattagtttcaatctgttttaaatcgttggtcatcagtgataaaccgctcttgatatcaggctcaccttgatcaaccaaataacgcaagttagtgcgcttaaaggtcatattcacgtcacgaataatgcccatctttaccgtttcatagacaaagttactggccataaaacacatctgacctaaggcagtcaaagcagccaggcgaatcaaatgcagataatcatgcgatcctgacgaagcaacattcaacataatttgtaccatataagctacaaagacgatgttgcaggccttgattgcggccaaaatggtatagctaataatttggctttttttagcgtacttcaggctcattaatttctccttttctatcccattagaaacattatacccgctagcttgtctttttctcaattagatacgataattagagtaatcattttaatttttaatgaaaagcagaaaggaacttttaatgaagactggtactaaaattattactttagacaacggttatcacttatggaccaacacccaaggtgaaggcgacattcatcttctagctttgcatggtggtcctggtggcaatcacgaatattgggaagacactgcagaacaattgaaaaagcaaggcttgaacgtgcaagttactatgtacgatcaactcggttcactttattcagatcagcctgactactctgatcctgaaattgccaagaaatatttaacttacgaatacttcttagatgaagtcgacgaagtccgtgaaaaattggggcttgataacatttatttaatcggtcaaagctggggcggtttgttagttcaagaatacgccgttaaatacggtcaacacttgaaaggtgcaattatctcctcaatggttgatgaaatcgatgagtacgttgcttcagttaacagaagacgccaagaggttttaccacaaaccgaaatcgacttcatgcacgaatgcgaaaagaacaacgactatgataatcaacgctatcaagatgacgtacaaattttaaacattaattttgttgatcgaaagcaaccatctaagctttaccacttaaaggacattggtggaaccgctgtttacaacgctttccaaggcgacaatgaattcgtaattactggtaaattaaaagactggcatttcagagatcaattacacaagatcaaggtgccaaccctattaacctttggtgaaaacgaaactatgccaatttcaactgctaagattatgcaaaagaagatccctaactcacgcttagtaactacacctgacggtggtcaccaccacatggttgacaaccctgacgtatattataagcacttagctgactttattcgtgaagtagaaaatggtacatttaagggcgaaaattaattaacagatattcaggctggaatcgatttccggccttttatttttaaggaaaatgatatggatgaaaaagatgtcaaaattctgctagttgaggatgaagaaagcgtcgctagcttcgtcaaaactgaattagaatttgaggattaccaagttgtttgggctgaagacggcaaaaaagcattagacctttttactcaagaaaagccaactttaattttgcttgattggatgttgccagtatatgatggcatgaccgtgttacggcgaatccgcaagcaaagtgatgtccctattattatgcttaccgccaaaaattctgcctctgatataagctctgctcttgatcagggactagacgactacctcaccaaaccatttgaaatcgaggaattgctggcacgaattcgggtagtcttgcgaagactggaaaaaatgcggcagcaaaatgacgtccctgatacttccctagaatttggcccattaaaaattgatctgcttaagcacgaattttactgtgacaccgagcaaatttatcttactcctaaggaatttgccttaatcactgaactaatgcgggaccccgaaaaagtcaaaagtcgtgacgagttgcttgatacagtctggggatatgactttgttggtcaaaccaatactgttgatgtttatattcgaactattcgcaacaagataggcaatccctacaaaaagatcattaaaaccatgcgcggcttgggctattgtttgagaaaattagatgataatcatgaaaaaagctgatcctcaaacaactacgcaacaattaacccgtttattcgttaggctatttgtcgctattttaattctggtcaatttggcttttctaattatttcatcggcctatatttattaccaagctgaacggcaaagtgaacaagttgttgaagcagtaaaagaaaatcttgattcaaaatatgactggtcggctatgctggatgcttatttggcaaaacaagacgatgatgccatcattttaaccacccctcaaggcaaaagttattactctgaaaatgctcacgagacctttaaacaaattaatcgccaaaatcattatcaaaacatggtctattccaataagcatatttacttcttacggacggaaaactcgcatgactttaaaatcaaggttgcattaaacattgatcgcttatttcatttaattatttggctatttgggacaatgattgtcatcaacttaatcgctattctgctgagcatcccccttattcgccgttttgcccacaaatggagtcgtccaattcaggtaatgaataatgaaattcaagaaatccagcaaggtgcttcaactgagcaaatcacagtgccgcaacaaccattagagattcgaaaattagcccagtcttttaacaatctgctagcttttcaaaaacaggccttacagcgtgagcaacaattcgtcagtgatgcttcacatgaactcaaaacaccaatcgccgcaattcgaggacacgttaatttaatcagacgccatggtcaagccaaaccagaaatcatccctaagtcactggattatatcgatactgaatcaaaaaagatggaaatattagtcaacgatttactcaccttaggaagaatcgaacgcaatactgaagtcgtcaaaattgatttggtaagaattattaatgaagtagtgtcagaaatacagtcagtttatccacaaaaaatacagactgacatgccacaagtattgaaatatcgtattaattcactagattttcacaacattgtgcacaacttagtggaaaatgcggcaaaatattctcctcaagacagcactattgtagttaaattagctaaaaataaaggacaggtctctttcacagttgcagacaacggaatgggcattgcgccagaaaatcgcgagaagatctttcaacgttttttccgtgaagacacgtcccactccaataaagttaaaggatctggcctagggttagcaattgtcaaagctgaagctgataagtatcatggtcaaattaaagttacggataatagtcctcagggaacaatttttacagtttcttttcctacagaaaaatgaagaaatcttcatttaaactctattaaatcttagttttttaaagctgcttagctagtaagataaatatatcaagttaaagcaaaacaaaaaattatcaatagtttaaaggagaacatattatgaagactattaacttaaagaaaattactattactggcgtagcattactcggcttaggaactgctgcaattaccgcaactaatttagctactgaacctaacgtggttcaagctgcttcaagcaaaattaaggtttcacaaaattcagctgttaaaaagtttaaggcaaaattcaaggcagctaaagtcgaatcaatcagcttagataaagaaaaaggccgttacgtttacgagatcgaaggcttcaattcaacgagagaatacgaaatgaaaattaatgccgcaactggcaaagttatctcatcccactccgaaagacttgatcgagacgagcgtaataaaaaagcattaaatttcagcaaaactatttctcgctcaactgctactaaaattgctcaaaaaagagtatctggcaaggcagttgaatggtcattagatcgtgaaggttcaaagaatgtttgggaagttaccatcagcaagaacggccaaaagagcgaagtaaaaattaacgcaattactaaaaaagtaatcagtgttgaacgggactaattgagaaaagaaggtatagaatagatgaaatttactaaactgacaagtattgcattattaagcgcagctttattaacaggaactgtagcatgttcaaaacaagataattcaactgctaaaactactacccaaaagagtgttacttcatcaaaggttacacataattctgaatcagcaatgagcaaacaaactcaaaaagataatattcaaatcaaattaagccagcaagaagccattgataaattccatcaacaatttagtggcaaacagcttaaaagcattgaattaaatcgtgaaggcaaacattacctttatgaaattgaaggattcgattcaaacaatgaatattctgttaacatcaacgcagaaactggtcaaattggacatgttcattcagaaaagttagatcatgatgatcgaaaccaaaaagctctagatttcaagggcaccattagccgcgacgatgctagtcgtatcgcagaagagcacattaaaggcactagcgaagaatggaaactagagcaagacgaagacactggtaaaacatactgggaagttaaggttaaaaatggtcatcaagaaaccgaagttaaaattaacgctcacaccaaagaagttatttcaactgaacatgatgattaataagattaagaacataaagaaagccgcaacattattctcgaagttgcggctttttattttgtctaatttttggataacttttttaccaataaccaatcagtttgaggatcgctaccaacttggaaagtatgctggctcactttttcaaatccatgacgcttataaaaatattgtgccggaatgttcttttcataaacgcctaaccacatgtaatctttgccttcttctcgtgctgtcttttctgcaaaatcaaacaaaacattgcccaacccgcgatgttgaaaattagtacgcagataaattcgttccacttctagagcattatcacgtaactgctcagtctgagcatccccaacattgatttttaaataaccagcaatttttcctttaaccattaaaaagtaaaaacgactattaggattttcaatctctctaatcaacttttccgtctgataatcttcctctaaaaagcgtttcatgtcatctggtgcagtataaggatcaaaagtcgttttaaaagtttcacgtgaaactttctgtaattctttcacatccgctgttgtaattgctttaatctcgtacttcatcaatatttcctctttccaccgttcttaaccaggtgccaattttcactggcattcttttctacaatttgtaacaaagcagctaattctgttctctgtttttgatctagtcctgtcaaaactatttcatttgaataagcattttctttttctattcgagcagctaatttatctcctaattctgtcacaaacaaatgcttaatctttttattctgctggtcattttctttcctaatcagctgattttgttccagttttttaatgctacgagctgccgtcgtccgatcaacattaagcatccctgctagatggtcagaaataattcccggattttctttaatgcgggctaaatacaggtactgacctcgattcaattgcatctctttaaattcaatattagcaatcgaatcaagtgctcgcgcaatagtgccaatttgacgcaaaatatcttctttcatgtttttcacctaaaaactattatatttaattttgttgtaattgcaacaataaaatataaaaactaaaaaagggatcgctccctttagttaattcatcaatttttctttagttcatttagatcgactacctgatcagctaactgcttaacttcatctcttaagtggtgagttaccataattacggttttatctttttgcgtcaaaatcaatctttctaattgtacgctagaagctttgtctaaggcagaagtagcttcatctaacagataaattggtgtatcacgcagcaatgcacgtgcaaaagcaacacgctgtttttgcccaccggacaactgtttaccttggtcagctaaaacagtatccatgccatcaggcaacttagcaattagatcctctaatccacattctttgatcacttcagaaatttttgcttttgaaacttggcgtcccaaagttaaattccaccctagagaagcagtaaaaatatatggatcttgctgcaaatatgtaatctgatcatgcaaatccttatctgaaatctggttatattccacatcagaaatttcaattttcccctgataatctctaagtaagccagaaatcaaattcagcagagtcccccatcagaatatatttatttttcagtttaaaatttaaattcaaattctcaaagataggcttatcttgtccagaatactgataagaaactttatccaattctagattgcttagtttaaaatcagcaggcaaagctccatcaacagttttaagcggtatagtcttaaatttttctataattggtttaactgatttgaattcttgccaattaaaactaatcccacttaattcagcgaaaattgtactggcaaaaaattgtgccccactgatggtcccgactggcgttaattgatgcaaaatcaaccagcctgtttgccctaaaatgataacttgactgataaaggctagaccattggtaatcgcctgagttatcccggctgttttactataatttagcgcatgttttttaacatcatcagaagcgccattgatctttttgacgattgtttgcggtaaattggcaagaaataaggtattgaagccattcaacacatcattaattgaattaaccaaacgttcattggcatgggtatattctaatgaccttttggccaaaattttagaaaacaaattgggaaccactcccataataattgtcaaaataatcacagtgaccacaagactgacattgaagtacgccaaagtgagcataccgaaaacaatttcactgatttgtctaatgatcatcatgaaatcctcgacaccaaagttattaatggttgtaatgtcattggtcagccaagaattgtaagtagctaccgtttgttgatgaaagcctgaataactcgtctgtgatagatcttgcgcaatgtcatttctaattaatttatccacattttgtgccaaacgggtttgctcaacattgactagacagttaacaatcgcgtaaaaaatataggcaccgcccattaaggcaacccacatgaaaaaacgctcagcttttaattttgcaactgcacttaaagcattagcgctagatattccggctagtgtcaaaaagcctgcattaatgactattaaaaatgtaacaaataaaaattcccactttaatcttttaaaatattgcagtaattccattgattctccttatattaaaaataattaaattaataatactatatttatgtatttgttcaatattttttaatactttacttaaattactgcaaaattaaaagagactgtaaaatagtttgtgtaaggatgaatgattccttaaatttatttctttaaacattagaaaaaggagttcctttctcgtatgattggtttgaacaaaaaaacacatacagaaagaagaactccttcatgaatgattttaccaaagattttgctcaagctctattcaatccagacaaaataaatgatttattgcgcaaagagctacaacaggctgttaataacttgttagaagctgaattgaccgcctttctgggctatgatccctatgccagaaatggctggaatactggcaactctagaaatggtgcttatttccgcaaagttgatacgcaatttggcccaattgaagtgcaagtgcctcgggatcgcaacggtcaatttcatcagcacacgctgcctggctacaagcagcactcggatatcttggaaagcatgattatcaagctttactcgtgaccaccagggaaatagccgatctaattgaaaagatgtatggcagccattacagtccagctcaggtatcaaatatttccaagcagatgattccaaaggttgaggcttaccacaaacgcaagctaagcgacaagtttttctgcgtctatttggatgcgacataccttcctttgcgccgagaaacatttgagcgtgaagcagtctatattgccattggcatcaagcctaatgggcacaaggaggtcattgactactgcattgcacctagcgagaacattgaagtctggacagatatgcttcaaaacatgaaatcccgaggcttaaagcaagttgagctttttctttctgatggtgttgttggcatgaaaacagccttggccaggacttatcctaaagctcattttcaacgctgtttggttcatgtcatgcgcaatatctgcgctaaagtacgcgtcgacgatcgtgaaaagatcatgaacgaattcaaacaggtgcatcaacagacaaacaaagaagaagccacagctgtcctgcatgacttctataccaaatggggcaaggtttacagccatgttatcagaagcttgaaagacatagaaccagatctgctggtcttttataactatcccaagcagatcagagcttcaatttattcgactaacatgattgaatcatttaacaatgtgatcaagcgcaaagctaagcctaaggcagagtttccaactgaacagtcgcttgatgcttttattggcattcaggcaatgagctacaatgaccgttatttcaatcgaattcataaaggctttggtcaggttcaggacaccttagaatcctactttgattaaataaataattaaaaaatcaatttacgagaaagaactatttacacaaaagatttgacagtttcaattaaaagggatcgctcccttttaattagtctacataagcatatttatatgaccattgcgtaccagcagtattatgaatgatgccgtgaactcgcttgttttgcaagtaagctgtggtctgttgataaatcggtgtaatagcctgattactatttacaatcttagctgccgaaatcagatcattccagcgtatgtcaggattattggcgtcttgattgccagcttttttaaccaaattatcgtactcagaatttgaccacttaccgtaattgtaagacgtacctgtcattggaatttgcataaatgtcatcgggtcgttgaagtcgccaccccaatgagagagataaatgtcaaagttgccttgatgtgctcgactggtggttgacttatcaggaatattggtaatatttatcttgattcccttcaattctttggtccattgtgactgcaaatattgggtcaattgatcactgtctgcttcatcatttgaagataaaacatcaaaagtcaaactcttttggccaatctcctgtaatcccttttgccaatatttcttggctagagctggattataatcaactgtatttttcactgcttgttctttagcaaaatctatacctgttttaggatttgcagccaaatcattggcaacaaagccttttggcagagttgagccattgcctaaaacctttttagtcacaatatcacgatcaattgataatgataaagccaagcgaatatttttattattcaaggcctttctattaactgcatttttatccttaaaattataaagcaagaaacgcactaacgaatatggatattgagtaaagtcattattgctcttcaagtttttaacttgctcacttgaaagtggagttaaatccaatttgccctgttgatacaactgataaccagtattgttagacttaactacttgatagtgaatcttgttcaacttgactaccttcttgtcccagtaatcattattcttaacaaatgaccaggtatcattagttccattccatcctttaatcttgaaaggacctgagtagacttggtactgagccttggttgcgtatctattgccatactttttcacaactttttcgttttgcggcccaaatagtggataagccatcaatactctaaagtaagcgatcgggcgatttaacttaaccactaccgtctttttatccggtgcagaaattcctaatgcattaggtgatttctttcctgcaatgattgcgtcagcattcttcacgccactaaaaagataggcatacggagaagcggtcttaggattcaagcttcttttccaagaataaacaaagtcctgcgctacaatcggatcaccattggaccacttagaatcacgtatcttaaacgtccaggtcttaccatctttagatacggtcccagttttagctaagccggctgttggcttaccatttttaccaagacgataaaaactttcgaatacattgccagtttgaccaaatccggtagacttactgatatcaatagtatctagtggagctgtggtgcttaaatttaaagtgccactttgagctgccgacttactactgctattgccattaccacatgctgcaagaagcattcctaatgaaatagtaacgactcctgctaaaactccctttagtttcgacataaattttcctttctcaaacaaaaaaatgggatgtactccaacacggaatacatcccattaagaaccacaactttttaactagttaatcagtaatagtcttaagatgaatcaccacatcagagcatgtcaaataaatgctgtttgtacaacaacattcagtgtattgacattgcatttgacgcttaaacatgtgattcatcatccttcttacttttgataagaataatcataatttattcgatcacgattgtcaacaaaaatctattgtataattatagaaaaatatttggagaaatttttatggaaattataaaatatggtccttacactcttttcacacttattagaacaatcctaacatttatcgtggctattgagcatatcggtatctgtttcttagaaatgtttggtaaacctgaacaacaagctaaggcttttgacatggatatcaattttgttaaacaagaagctgctcaagtttcactagctaaccaaggcatctacaatggtatgttaggtgtaattttgatcattgctttctttattttccctatccctattctttttaacgtatggaaattaattctaagtttaattgtcgtagtagcaatttacggcggattcactgcaactaagaaaatctttttagtacaaatgctacccgcacttttagcattaatttttcttttcatttaaaaatattgcatttttgtagcaaaaaacataagaaaattcaaagctcctagtgataagctgtcaccttgtgattatgtaatatataatatcagtaaacatatagaacataataacgaggtggaattcatgagaaaattttttatcattatcagcagcattattactgggttacttattgggataattggggcaacgatctatctaaatagtcaatcgtcaaaggtaagtaactttaccattcgaactactaatttaacagctcaaccgaaaatgatcagctattctagcaataacctgccacagattaatctctcacaggattccgccgttcagaaattcaaatcattatatacacatgcagtaggtcaactaccttagactgaagtctagggtttagtggcttgttagcttgcgctaaccagaacaccaacttgcttagatacggatttgacttaccagcagtaatcttttgactattgccgatagaggtcgtctaattaccaaagccttttaagtccgcgagttgctagcggactgcagcttttctaggctgcttcttttattttaggattctgccacttgcctaatcctttttctaagatgttcacggccgcattccaatcacgaatatgatgcatctgacagattgggcaagtccattcccgatccttaagggttaatttcttataaccgttttggcccataatactgccacattgatggcatctttgggtggtgtacttaggatcaattgttagaaattctttgccatatagatctgccttataagccagcatgttcaggaaactacgccaaccaacatcagaaatagcttgagacaaggcatgattcttaagcagttttttgctccttaattcctcggcaactactaaatcgtggtttttgattaatgcagttgagagaacttgtaagaagtcttcacgctgtctgcgaatcttgtcgtgcagtctggcaactgataagcgctgcttttgatagttttttgctagccgcaaattgcgtccttcttttttagcccggcgctgcctgcgagataatactcgttgagcacgagccagcttctttttggctttgcggtaaaagcgtggattagcgaccattgatccatttgaatccgttaagaaattatcaaggttgagatctattccaagttgactctgcgtcttaggcaaggctttaacaaaggcaatatcgctgcctaactgcattgataagtagaattgctcgtcagcggtcttttttatcgtcactgtcccaattctagttgagatatgattaagcaagcgctctttaatcagttttctaaaaccagcaatgcggacaacgcctagcttaggcaatttaatatgcttagcatcaataaacctagctgtcccgttatcaagaaaagcttctggctgcttaggatattgacagttggtctgatatgaccagtcgctgcgttttttatggaaagttgggattccatgaccaatcttacgatagttgttccaagccttctgataattttgaatggcattggcaagagcgaggctatcaatttctttaacacgcaaaaagctataagtatcgcggatattctttggcttagccaatagttcgctattagtgactacttcttctgccaacctagtctcataattattaagaatagaaaaggcaaaaggcattgcttgatattgtctaacagctaagtagcccttagcatgataattacttcgattacgtcctacataagagttgtagacaaagcgctgcgcatcatagtttagcttaatgattttcttttgcttagaactaggataaaagcgaagcttaacgccaaaatgataggctaaactgctcatttttttcatgtgtttcacctcctcgtattatataaattgtaattagtcatattgtgataattaatcaaattagtatttgctttttgatcttcacatgttagcctctaattgtcattggctttggtcaactggtctaggttatcacctcctgcagttttgtctgctttataagtctgccacccagacagttcctttatgctctaactcacatgctgtattgattgcttctttttgctagtccttgagcaattgggattaggtgcagctttcaaagaagcaaccagtgaatacttatactggcgagattgaacttaagaactgtaattaggggttaacatgtgaagatcaaaatctatgatcagaaatttgaaagaaaggaggccatttccaatgaaattatttgtcggtattgatgttagttctaaagatttacaggtcgttgcacttgattcagaagatcaaaacaaacgcttaattaacgatagctttgtcaatgatctttatggtgctagtgaactgaaaaaacaaattttagatctagctcaaaataaacactatgatcaaatcattattggcatggaagctacatctatttacagttttcatcctgcttactttttccaaaatgacgaagatttacaaaagctcaatgtagagactgatgtaattaaccccaaagaaaccagcaggtttcataaagtctttgaagaaagtaaaactgatcctctcgatgcttattacattgctttgtatctaagctttggacattatcgagtaagcattgccagacaagacaactatcttgctttagagcgtttaacgcgtaccagatatgaattagttcaagaactgactcgtaccaaacagcacttcattgaagctttatattatcgggttaataaactaatcactgtcgataaagataagattaatactcctcttttcggtgctacaatgatgtctattgtaaccgatagtaaaactctggatgagatcgcggatatgcctaccgaagacttaatttcttacttacaggttaaaggcagaggacgcttttccgatccagataccttggctaaagcaattaagaaagctgttagaggttcatatcgcttaggcaaagtaatgactgattcaattgatgcagtgctttctgttcattacaacatgattcaaagctttaatgaatctattaaagatctagaaaaagcaattgatcgtatcgttgatgcattaccagaaagcaaaattctggaatcaattcccggtattggcaaaacctatacagctggtattatcgctgagatcggaagtatcgatcgctttgataaagaagaacagctggctaagtatgccggcctaacctggaatcaatatcaatcgggagatcacagcaacgaacatactccaatggccaggactggaaacagatatctaagatattacttgattgaagctgccaatctagcaagattacatgatcctgttttcaaaaaatattaccaaaagaagtatgatgaagctgtctactcgccgcataaacgtgcttgcacattaactgcaagaaaattagtacgagttatctttaaattgctcaaagatgacaaactgtacaggacaccgaggtcttaatttcaaaaattggtctaaatttaaaagtaaacaaaagtttaacattaaaaaaatcaacctttaccaaggcttagtttcatatactcaaatttatgatcaaaaagaacaaatatcatcgcctttcatttgacttattaccacatgactcatagattagatatttatattttacagggaagtcgaacatatgtctctatttttttaataaaaaagctgactgctaggtcagcttggtcctatccatccccacattaaaatacggggattttcgggcgtttttcattaaatcgatcacacttagtttaagtaaagatatctatgtttatgacatagtaggctatgatgaccgtaaagactgtactattcaagttgacgcaactaataacaagattctaggtcagtctacgcaggtgcttgattatgactacgaaaaagatgcgtctttgaacctaaaaaagacaatttcacgccaagaagctaatgaaattgccctaaaagaattcagtggaggaacaccgatttcatgggaattaactgatgacaataatcaatcaatttgggaagttaaaatgatccacggtaaacacaaacataccgtaaaaattaatgctagaacaaaggctgtaatctaaaataatccccaacttatgcacaagttgaggattattttcttatcttttatctaggttgactatctgcacgtgacttgtaatcaccgttttcagtaccaataattagcttttcgccattcttgataaaatcaggaacttgcacaactaagccagtttccatagtagcaggtttaccaccaccagctacagttgcacccttaatctctggttgtgtttccttaacggtcatttcaacagttgatggcaattcaataccgataatcttgttatcatctgtaaagtccatatcaaccataatgttaggcatcaagaacttaacgtcatcacccaattgatcagctgaaacttcatattgatcataagtatcagtatccatgaaagtataagtattaccttcgccgtaaaggtattgagcctttttcttagttacttcaactaaatccactttttcagttggacgcatggtcttgtggacaactgcaccactcttaacgtcacgcaaatccatttgcataacggtattacccttacctggcttatggtggttagcctttaaaactttgatcaatttgccatcttggctaaaaatcataccttttttcaaattaattgcttgtaccattatttcttctccctttaatttaaacttacctttcgactagtttaaacacgctggaggcaaagcaaatttttttatcaacagtaaataaatcgtattcataatacctagtataccaaattagatgtgccgcaggtatatccgatcaatcaaatgtccgtcagtcttatgcaaaatcaggctagcacgttccttggttggcgcaatatattcacgcaagttgaccagattaaccatctgccaggtttcttcagccaattgaattgcatcttccagcggtccattagccattttatagtaaaaattatctggcttatttttatttaatttaagtacttttctaaagcgttgcatgtaccatttttcaatcaaatcttcttcagcgtcaatataaattgaaaaatcgaaaaagtcactagtcacaacttgtccactctcgggcaattgcaatgtattaattccttcaataatcaatacatcaggattttttacatgaccatatttcccaggtactatatcgcttaattcttgagaatatagtggataaacgatatccttctttccacttaaaacgtctcgtaaaaaatcactgagcaaagtcatattgtaactttcaggaaagcctttgcgaggcattaaattacgccgctttaatttctcattagggtaaataaaaccatccgtggtcatcaagtgtacctttaattctggataggttctactgagcaacaattgtaataaacgcgcagtggttgatttgccaaccgcaaccgaacccgaaataccgatgataaacggagctggtgaaaaacttttatgcaaaaatttgatttgtgctttttgcgcattctttttttgttggtaaactaagtgtaagtaactgatcaaactggtatagatctcatgcacgtcggttaggtcaatcacgtctcctaaagacttgatatcagctaattcttctttggtaatattgactttatctaagggagctaatttagcccattcatttctgttaaaactcgtataatttctcatatatcgtatccatattccttctaaaacactaacttattataatagaaagcgctaaaaatatgaaaaaaataatcctattcggcgattccatttttaacggatatcgtaatggtcaaaatacaaacctagtaactaatttatttcaacaggcactaattaattatgcacaggtggaaaacatttctaaaagcggtgctaccacagttgaaggcgtcgattatttggagcaaatttccccagaacatgatctagttgttgttgaatacggcaataacgatgccgcaacagcttggggcattagtccagaaagctacgaaaagaacttggctcaaatccttagtgcagtaggcaaagccattgttgtgggattgtgcaatcccaatccagaaagtgacatttttcaatattatggtgctgaaagactcgatctttttaacaatatcgcccaaaaagtcgcaaaggcacatggtgcacaatttgtggatattttacctgcaatgagaaacttaaaagacaaatcgacatattatcaagccgacgggcaacatttaactgatcaaggaaatgagtttttagttaatcaaatcgtgccagtaatcaaaaaagacttagcctaagccaagtccctcttcatcatcacatgttctacgccgccttcatcaaacggttcgcctacaacttgatagcccaagctatcatagaaaggctttacccgcatttgggcgtgacagtaaactgcatcaatcttattttgccgtaaaaatttatgcacagctgtaatcattttcgatcctagctgttgtccgcgcgcttcttttgacacagcaacgcgtcctagcatccatttaccatcttcttgaaacagacgacaagtcgctaaggcagtcgtctgtttttgattgagtaaataaacctgaacagcaattaggtcctcatcatctaaatctggtagagttatcttctgttcagccacaaaagtcgtgttgcgcaatctttctacgcaatagaattctctagctgtcatttcatcaatctttttaaaagtaaaattatctatcttcatattacttgcctaaccaactattgtttctgccaaaccatttttcattaagtttacgcaattgaccatttttttgcaattttgctaaaccttgattgaccttctgacgcaaagttttgtctcccttacgcatccccacagcgaacaagtccattggcacgcgatcattctgaattaccttgtattcgctacttttagccatgtgagcaatataatagtcggcataaacttcatctaacagaattccttgaattcgtcctgcattcagatccaagaacgaattagaaatcgtatcatataaaactgttttcttagcatgcagcacatcttgtttagtttcataccactgctctgctgttgaaccagtttgcattcctaattcataattcttcatttgtttaaatgaactaatgtcactatcttttttcacaactaaaacctggcgattacgtaaatatggcttgctaaaagctacttttttctgtcgttctggcgtaatgctgtaaccattccagagtaagtctatcgtaccgttacgcagctctgtaacgttcattgaccaatcaatcgtttgaaaagaaaccttaatgccatattgtttaaagactgccttagctaagtcgatgtcataacccgtcaattggccgtttttcttttcaaagcccattggtacaaaactatcgtctaagccaattaccacttgctttttgctggcaatcttattccatgtatcttgagtattagcttctttttgtacgctttggcaaccagttaaacataatgttaaggccaagacgatacctaaaatccattttttcattgcctaatcctcgcttaacggtcgaaccttgagcatctgatccgccacattctctgcaaaattcaagtcgtgggtgataatcagctgggttaaacccgatttttttaagcttaaaatcattttctcaacttccttacgtaaatttggatctagcgcgctagttggctcatcataacaaagaatccgcggtttcatagccaaagctctagcgatagctactcgctgtttctgcccacctgataactcataaggatactgctgttcacggccacttatttgtagacgttttaacaatacacgcgcatcctgctctgcttcagttttactcttttttaataccaaagtaggtgccaaagtgatattttgtaaaacgctcaaattaggaaaaagattataatcttggaaaacaacgccaaccttgcctgaatcataaggtttaccgtcaatcaaaatttcaccagaatcttttgtttccaaaccggcaataattcttagtaaggtggttttccccgctcctgatggacctacaattgtcataatttctccgtctttcaaggtaaaagagatgtcacgcaaaattcggtgaccgttaaattctttgctcaaattttttacttctaacatattctcacctcaactacttgtaataagaaaagtatttttccagctttttcaaaacaaaagcacaaatactgatcaacagtagataaattacacctactaaaactaacggtactagcgttacgtctctggccattgccacattgccggccctaagcaaatcacctaaaccaatgacataaactagcgatgaatcctttaccaagttaattacttcatttccaattgaaggcaaaacaatttttattacctggggaataataatcttggtcatcgtttgccagcggctcaagcgcaaaactttcgctgcttcaaactggccttcatcaatcgattggaagccgccacgaaaaatttccgcaaaataagccgcataattcaaaacaaaagcaaacaaggctgcttgatagcggggaaagacgatatgaataattggtaagccataaaagacaaagatcaattgcaataataagggcgtgccccgcataatccaaacataaaagttaaccaaccagcgtaatggtttaaacttacttttttcacctaatgagaccaaaattcctaatggcgttgctaaaattaacgtccagaaaaaaatacttaacgtcatgcctgctcctgacaaaagagcgggtaaaatttctgcaatatattttaatgacatactctcaccttcatttttctttcctaataaaaaagccctcttaggattaacctaagaggacgactgctcgtgattccacctcatgttcgcacctgctcacgcagaaatgcctcactaggttgatcattttaaaagaaaaaccctcatagccaaacggctacgagggcgaatgtaatcgcggttccacctcatgtttacaaattgctcacgcaacttgcctcaataagttcaataatcaacctttagctataacgggctatcccggattttcctacttttgttcagaagaccaactcacagatgtgattcatactagcaaatatcttatttccaccagcaaagactctctattactttgactagtattactatttctgttctaagttgtttttaatgttgaataaatcttaaatgatctagcaacttttgtcaattatttttcttcataagtatctggatcaacatcaagcaatggactcttttctccagtataaataatatctagcttatacattgcacgagaggtaatagtataaacaagttgagtttcatccaatttatggtaagcagctttagaggcatcccacatgactaccgcatcaaattctagtcccttagccaagtaagaaggcacaactagagtaccatcaactagtcgctgattagcagtcgcaattaaggtcgtgttttcaccttttttagctaattcttcatgcacaaatttagctgcagctaagtctttggtaataacagctgtcgtacgcttattttgttcattattatgcaaaacgttaactaaaacatcaattgcttcatcatcgttttttctgccccaaattataggcttaggacctttacggttaaaggcttcaatcttttcgccttgacgcaaaatttgcttggtgaaattggtcaattccttagttgaacgatatgatttcgttaattgcaccacatcagttttttcaggatcaaataagccagagatctgcttaagtaagctacgactttcatccttagtaaaaatagcctgattcaagtcacccaacattgtaaacttggcccgtgggaaattatacttcaagtaagctaattgaaatggagtataatcttgaatttcgtcaatgaaggcataacgcatctcaaagtcagtcctgcgaccagtgatcatgtcatacaaatataagtaagctgaaacaccattcatggcaatatggtgctgcttaaagttattcttaacttcttccacatgagccaaccaatcattttcatcaatattccacttagatagatcaaccatcttaggtacagctcgcaaaaagctcaggtattgtgctcgcatattcaaaaagtggttgtgcaaaatacgcttatgcacgcccttcaaggctgataatacaatttttctacctaaaaaggcctcttccttagcctcagactcaaattcttgatcaggtcgatcatataactcatttaattcagattggctcattccttcaatagcgtgtgccacccaagccttcttagtttctggcgtaatctttcgattcaacatcttgatcaattcttcacgcgttgcatcaattcggttggccaacttgtaattttcattgaaagaataatagatctccttaattttttccttatcaaagtaaggtttcttcttatcacggaaataaatattcttaaaaataacaccgcgcttattcaagtgctctgcataacgagtcaacaagttaaagaaattaactgaatccttaaacttagaaatattgctgtctgcggtttgatcttcaaactgtctgaataagttttcaacttccatacctggcaaccgtcgcgcaacaaactgccagtaagtcatttgaaccatattttgttcgcccatttcaggcaaaacattcttaatatagtcattaaacaactggttaggactgaacatgattacatcacttgaagtcaggttgccacgataacgataaagcaaaaaggctatccgctgcaaaatcgcactggttttaccagaacctgccgcaccctggacaaaaagcagatctgctttggtgtttcgaataatcttattttgttcgcgttgaatcgtcgttacgattgacttcatctgcgttgatgatttttctgacaaaacttccaagagcatttgatcaccgattgactcatcagtgtcaaacatgttcacaatcttgccatcttcaatcataaattggcgtttcttagtcatatcaactgtaatttcaccttcaggcgaattgtaagaaactttacccaatttaccatcataataaattgaagatattggtgcccgccagtcatagatcaagaagtgatcgtccttgtctgcaaaagaacctagaccaatataaatcgtctctgttaggtcctcatttttttctttaaaatcaacccgagcaaaatatggtcgcttctctaaacgctctacagtctctagctgcttagctgaatgttgccaagcatgttcacgttcactcaataattgttgctgctggtggattgacagtgctgtttccattgaagtggaataaccatcataatccaatttaacatcgtcaaaaaagtgtgaattaagctctcttgcttcgccttcagctgatttgatagatttttttaaagttttttcgcggtccttgatctgacccataatattatcaaggtgcttttgttcaagttctttttcgtttttttcagttttggctgtagccatctaatcaccttttctttaaaaattcgcatactattttaccatgaatagcgctttcataatagttttcctgctcgtgagaaaaatataaataaaaattgatgaaaactttaactttagagactataatcttgacatattggggtgatatatacatgaaaagattttttaaattactgagaaatgttctcttgcttgctcttatcgctcttggcgtttggacttatcagaacaatcccaatattcgtatcgcaacgcaagactccctagctacacttagctatcgaattaacgaacttctaactaacgaaacgaccatttctcccaataacgaaaaaaagactactaatatcaaaactgacacagataaaacagaaaatgacaattcttcagacaatcgtgtatggtcaaatcctgaagctaaggtttatatcgatattagcaataatgctcaactaagatcagctgcagtcaatgcaatgaacgcttggaatcgtaccggtgctttcacttttcaccaaataaatgataaaaaagacgctcaaatcgtcattaatacagtcgataatagctacaccaatgccgcaggagaaacagcaactacctataaccctgctacgggacatttgttaaaggccacggtcaacttgaaccgttactatttgcaaaacgaatggtatggttacagttacaatcgaatcgttaatactgctgaacacgaattaggccacgcaattggcttaaaccacactaataatgtctcagtcatgtacccaaagggttcgatctatacgattcaaccgcaagatattaaaactgttaaaaagatctaccacgaaaataattaactttaaaagctcacctcttttttctacaataaaaggtgagctttttacgaggagaaaaatatgaaaagaatttatatcgtccgtcacggtcaaacttatatcaatcgctacaataagatgcaaggttggtgtgacacaccattaactacaccaggaattgaaggcgctgaagaagctggtaaagctttaagcgaagtaccttttgacattgcattgtctagtgatcttaagagagcaagtgatacctgtgagatcatcatgaaatataacgccaacaaagacgaattgcagcacatcgctagtccatttttcagagaacaattctacggctacttcgaaggaatggattccgaaatggcttggcgaatgattggtggcagtcacggctacggaacacggcaagaaatgtttgctcatgagagcatcgatactattaaggattggattaaagaagccgatccttatcaccaagcagaaaacgctgaagaatattgggctcgtcttgatgatggttttaaattaatcagtcaattggatggcgctgaaaacattctgctagttactcacggcttcactattagaagtctctggtatcgttatggtgaccatattcctttggttccaggtcctaagaatgcttcaatcactattatgacaatgagtgaaaaaggcgaaattaagatacctaagtggaatttaatgcatttatagcaaaataagattaggcgaatcgggcctaatcttattttgtttaattatttttgcaaaacaatatttttatatagcttcactgttattaaaaaacttcctactatttttaacagtaggaagtcttactctaactaatctttagtcacttgttttagtttttattaacttgcagtcgcccaaagtctgaatcaattgtttgccatctttttggtggaaaacagcgttttgatacgacaatcgttctttctttttactcttatctttatactttttaataaaggttacttcatagttaatccgactataattacgcttacctggtaaaacagagagcaccttgatctttacacttaatttcttgatactcttctttttatgccattcctttagttgcttagcaatcttcttatagtctgcattttcttttccattttcaaagtcatctgcatttggcgacttaagggtgttgtacaatagcttagctgcatcccccaccttaatcaagccaggccaaatcgggttaacaatatagtcaccttctgcatcctgatagacatctttttcgccattgccttgatattcagcagtaccatcataatcagtgacgtcatcctcactattagaaaattctgaactaatcgattgcgacaaatccgttaccctttcggacttaatagtttgaccatctgccttactcttaatatagatttccattcgcttagcaatcggataatccttgaaagtatagctaccatgctggttcaatttacccgccttacgatcattgatatagatcgtaccattaggaacgctgcgcacttggaaagtggccgttttgatcttcatatcaacagtcttatctgaccaaatgttaacaatcgaatcagcatctaaatggcgaccattaaccttagatttaactaatatatgatagcgaccaggaaagaccatacctaaatcttgatagtaattctgattgccaccttccatttcaccataatccttttggttaaccgtcaaagttgaattagcgtgattggtcttcacctgtgggcgatatacttgtatccacaacttatattttggaaaaagcaaaaaattgcgtccatcttgaatcagtctgatttcaccatgatcgcgattatgacgcaaattataggctaaacgtttagctgcactgtgatgctctttaaagtaattttgaagcggcttcagcgatttatctgtcacatccatatcaggcgttgaagccgtgacatactgagccagctcagttttaggatcctgcattttagctacaatgcggtcaatttgacgttctttagtgtaataaaaattgccaattagccatgcaataccaattaacaggataataactcccgatatccaaattttcttatgttttttcattgatcaaaacaccttttcacaaatccttttaacttagattaacaagttgatcaaaaaaagcaaacatcttttgttcacaaatcaagacgaagttcttattatatttagtagcattattttattttggaggggattgcacagtggaagtaaattttgattttgtaaaaaatagcagcttcaaggaagcctttcctaccgctgaaaaaatccacaaattatacacaattgatgattatcgtgacgttatttcaaattcacgtcttctattagagagtctaatcaaaaaaatttttaagttagaaaatctcagtccatattacacagttcatgatggcgaacaccgtaatttgcgtaataatacacattatttacgcaatgaactagattaccctctttcgatcatggatttatttgacgaaatacgccacattggcaacgctgctgtccacgataaccaaattgaaccagatcaaaagcaagcctggcactgtatttgtgatttacacgatattcttgtctttttaattaacagctatgacggtcaagacctatattatttgcgtcccgatattgcgatggaagcacaaactgatgaagaccattattatgtgcgccaaaataagcaaccaaaaataatgaaattgcatgatcatcaaaatactaagaaaaaacagtccgcatctgcaccaaaaaaggcgaaacatgttaaacatttttccagtaaacagcatatagagcaaactaactctgcgtcacaaacgaaaactactccttctactaaagacaattggttaagaaaaattaaagaactctttcaccatgattagttatattgacactatgtcacaatatgataaactatatattatataatttacataccgagaagcgcctatgacgctgccgatacgcaaatgaaaactgaacaagtttctcaaatggggaacggcttatgctagtaggtcgttttccattatttttttacgaaaggagtggttagtccgctatggataatcacaggcaaaaaccttgggctgtcgaacagtctgaggtattaacaaatacaaaaacaaccgaaactggtttaactgaagacgaagttcgaatacgccagcaagctggtttaaacgagctcgcagctaaacctcctaaaacagtaatccaaatggtcaaagagcagatttttgatccaatgatcggtatcttattagtagctgccctcttatctgctatgtttggcgaatataccgaagccattattatcgcgacaatcgtggttcttaataccattattggagtagttcaggaaaaaaaggcacagtcttctttagctgcgttacgtgacatatctgcgccaactgcccatgtaattcgtaatggcaaagaattaatcataccggccaaggaattagtagttggtgatattgttaccttgcatgatggggacatggttccagccgatttgcgcttaattgaaacagctaacttgaaaattcaagaagcatcccttactggtgaatcagtaccggtagaaaaagacgcagctgctgttttaaatccagattgtgctcttggtgaccgcatcaatatggctttttcttcctcaattgtgacttatggtcgtggtcaaggcgtcgtgacagcaattgggatgcaaacagaaatgggtgccattgctggcatgttagaagatccaactgaagtacaaacaccattgaaacgcaaattagctaaagctggcatggtcttaacgactatcggcttaattatttgtagtttggtctttgcaattggtgctttctatggccgtccacttttaccacaattcttggttgctatctcattggcaatttcaattattccagaaggtctgccagcaaccgcaacaattgttatggccttaggcgttaaacgcatggttaagcgtaacgctttgatcaaaaagctgccagcagtcgaaaccttaggtaacgccactgtcatctgttccgacaaaactggtactttaaccttaaacaaaatgactgttacacaggcagcaacaaatgacttcagccaaagtcacatagttgaccagcttgcagcaaataaaaccaatcaaactttggcctatgctagcgctctttgtaacgatgccagcttgaacggtgaaaaagaaattggtgatccaactgaggtagccttaattctttttgcccaaaagcttggctttaaccaatctaacttaaagaaagaattcccccgtttgttcgaacaaccctttgattcggacagaaaacggatgacaacattgcacaaaattgacggtcaattaacggtcttcactaagggtgcaacggacgaaatgttgccgttatgtacacacattatgactaacaatggcgtgcgtaaaattacaccccaagacaaaaagcaaattgcccacttgtctcaccaaatgcaagctggcgctttacgagtactaggctttgctaccaaaatagtggataacttacctgaagcaaatgctgatttggaaaataatttgacttttatcgggattgtcggcatgattgactcaccacgaaaagaagttgcagcatcagttaaaacctgccgtgaagccggtattcgcacaattatgattaccggtgatcacaaggtaactgccttggcaattgcgaaaaagttaaacatttatcagccaggtgacttagcaatctcgggaactgaattagaccaaatgtctgatgcagaattagatcaagctgttgaaaaggctaccgtttttgctcgcgtttctcctgctgacaaactgcgcatcattcaaagcttaaagcgaaatggtgaagtaacagctatgaccggtgacggagtaaacgattcacctgccttaaaggctgccgatatcggtgtcgctatgggtgtaacgggtacagacgtggctgatatgattttgcttgatgatagttttaccacaattgcgcacgctatcaaggaaggtcgccgcgtttaccgcaatatccaaaaagtaattcagttcttgctagtcggcaacattgctgaaattaccactttgtttgcggcaactatttttaactgggatgcgccattattggcagtacacatcttgtgggttaacttagctacagctactctacctgcccttgctcttggcgtagacccagcaagtaaaaacattatgaaacacaagccagttaaagctggtactttattcgaaaaagacctagttattcgggttattacccaaggaatatttgttgccctgcttactttaactggttacttcattggtaaagaaatcggcaatcaagttgtcgggcaaaccatggccttcagtattttagcattggcccaaatgattcgttcatttaatcagcattcaaatactgatcccatctggaaaagatcagctggcaataatccatggttaacagtgtcattcattatctctgcatttttcatgggtattattctctttgtcccagcaatgcaagatgcatttcacattaccagtttgtcagctggacaatggttaatcgtaattgccctagctttactttcaattgcacaagttgagttagtaaaaggttgggcaaagtttagaaatatttttattaatgacaataatttaattgaagattaattagttacaaaaagacggtagcattacaacgctatcgtcttttttgatattaaactttggctgctgccaattggtcaacatctatctgactacgaccaatctgaattgccttttcggtactttcattcaagctagcattgatcatcttatgactaagctccagcaccattggcaaattaacaccgctaactacccgtattcgctcaggatacatatcttcatattccgaagcgactaagtggggtgtcccattttttaaatcagttagcaccaaaatctgactattttgatatttattcatgactttagcaaaacgagccttaaaatctctgattcctgtgtcgtttaattcaattgtcaggatctgatcattcttgcctaccaacatatcatgtgcagacattagccccgcagccaacccttcatgagttgcaattaaaagttccataaaacgcacctctttgtaagcgatttctatagaaccattttaacatatttttgtattaattaagctgttcaatatctgctaataagctactttgttcaggtgttagccgctcatccttttgccgtaacttaagtacttgtagacaagtgtgcaaaatcttttttccttgttccgtcacttgtttgccatccatatcaggcgttacactggctaaaaagtcatccatctcatcagcagtaaccttgaaaacatcattttctccatgaatcaagggcatccgattgagcatttcttcaatcatttgtaatttatttctagcttcttcaaaatctatcttgttcacatccaattctttttcttttattatacaaaaaaacagccacctaagtgactgtcatctttatttcgtattaataattgcgtttgaaattgtagttgcattagattcgatcagttgatgtgaattattaataaaaagggaagccccaattcctatagcagcaaatacaagccaaactttctgtaaaactgtactcttcatgttcccagctccttatatttcttattacttaaacttcccacacgcagaatcgctccttttattgtgattctgcgttttttaacaaatataaaaggcacatgaccttttcattgctataattaaagtgaccaaacgataattctatgcatgaaaggcttgtgccaatgtctattttaccatctcctgaccaaaaaaatgaacaactattttcaaactcaatcatcagcttcatcaagaagtttcaggtgatcaagctgttgagaaaatgtggcttccgcaaggaaaaaggcattagcctgttcagcttgtttctttacgttttaagcaatgtctttcgtgaccgcagcttatatatgcagctgaaaacggatcattttaaagaaagcttttctaaaaattcttattaccgatttatgcgcaacgtccacgtcaattggctccacttcaccacactgctttctgcgcaaatcattaataatcacttgcgatctttgacttcagaaaaacgggctgattgctttgttgtcgatgattcctacttctctaggaccggcttcaagaaaacagaattagtcgccaaagtttttgaccatgtatcaatgacttacaagaaaggttttcgcatgatgaccctgggctggactgatggagcttctttcatgccaatcaattcggtgttgctgtcctctcacaagctacagaatatgattggcgaaaacaaagtctgtgatcagcgcaccattgctggcaaaagacgcatgcttgcccggactaaaggcacagacgtgatggttaatttaatcgaccaagctatgaaagcaggtcatcaagccaagtacgtgctgtttgacagctggttctcaaatccacatcaaatcgtccagctcaagcaaaggaagctggatgtaattgccatggttaaagttagctccaaaatcaaatatgaatttgaaggagaacgcaaaaacatcaaacagatttatcgtagctgtaaaaagcgacgcgggcgttcgcgctatctgttgtcaattccagtcaaggttggccgccaagacaaagacggtgctaaaattgacgctcggataatttgcgttagaaaccgtgccaatcgtaaagagtggctggctattatttgtaccgacatgtcgcttagcgaagatgaagtcattcgcaattatggcaaacgctgggatattgaagtttttttcaaaacctgcaaaagctacctaaaactaagcacggaatatcatggtctgtcctacgatgccttgactgctcatgtggctatagtctttacccgctatatgctcatgtcagtagccaagcgggacgacgaagatgagcgaaccttaggtgagcttttctattgcatgattgatgagctggcggatattacattcagtcattcacttcagctaatcacaaaagcaatggtggctagcgttgaaaaagtctttcatgccagtgaagcacaaatagcagaattcacggctgactttatcaatcgtttacccaaatacatgcaaaaattgttaaagaaaactagcaaaaatagtatagaagcccaaagctaagcaatatcaaagaattgccagcttatttgatgtgggaagtttaagttattatataaaaagccgatcgttatggggatggctacgcttacaattaacataattgtaatattatttacctttacttaagagttacttctccagcaacatttgtatcaaaaaagtcagcaatttgatggacgtccatcccttgccctaaagcccacattaatttggtaatcgcactctcagaagtcatatcacaagcagaaatagctccttccagtaaagcctcacgccccacctcatatttggtcaaatcgctacgttcatacaagcattgactgctggctacaacgggaataccttgacgaattagcttaccaattgcggctaccatgttgcggcgaataaagttcatcccgcctagaccatatgcttcaataacaattccacggcaaccactattaaccatcgcaaaaagcagattaggatcaaagcctggaaatagtttcaccaacgatacgtgtgaattaattttggtattcaaggttggctgaccgtcatgttctctttgaaaatgttctgaattaaaaactaatccatcggaagaaacggttgctactggtggcacattcacactttcaaaagcatcaaagttggtagtccgcacctttacactgcggcagcccagcataactttattatgaaaggctaaataaacatcaggtggacaagttgctgcagctgcaaaagccaaccgtaggttatcgtgagcgtcacttaggaccacgttaattggtacctgacttcccgtcagcacaaccgggatattaatatttttcagcataaacgacaacattgatgccgtataagccatagtatcagtaccgtgtgaaacaacaattccatcgtaatcattgcggtatttgtagatattttctgcaataaatttccattcttctggttggatattagaagaatctaattgcaaaatatcgcggacttgaatgtcgtacggcaactttcccaacattttaattaactcttcaccggtttccttgggtactaggcctgcatcagaagcaacggaagcaatagttcccccagttgatagcaataatattttcttcatcttgttcccctttatctcaaatcacaatgtcgaccataactattcatgattagatcaattaaaacataggccgaactaaaagttaccgcattttgcttactaaattgaaatggcgtagttttgaagaaaaagctatagtcgctaagagaggctaattttcccgtttgccagctagtcagtgacaccaatttcagttcagtattcacgacatcaatcttcttaagttcttcaataattgttttattaaaaccaccaaatgaaataacaaacagcatgtcattttcccgtgcagaccgccctaataatgccacttcgtcgcgtgcactaggcaaaataattgcttttttaccaattaagaaaaagttatgcgccaaatattccgcgataatttgctgctgccagccagtagagtaaagatagatcgtttccgcttgatctaaatccgcaaaaaatggttgtaagtttaatcccttaaaatatttaaaagtttcagcaatgatcttttgtaaatccgtattgaaatctagcgtttgcttgttcttaacgttttgctcctttcgtgtagctaactcggacaattcaaatttcaattcgctgaaaccacttaatcccaattttttgcttaggcgaaaaatagcggacttagaaacgtataatttctgagctaattccagcaaactcaactgacttgctacttcaggatatttcaataaatagctaacgatcgctttatcggtctcattaaaactttcctttttcttcatgaccgctgtttctaaatccattctgtttcctttctcatcactgtttcttattaagaaaagaatatcatgtcgtactcaaaaaaggtagccaccctatttgagtaactaccttaatttttattcttgaattgaagttatgttatgacaattaattatttaagttctggccagtatggagcattaactggaatcatgtcatccaaaatcttcttagcaacggaagcatctggtacagtcttgtttaatgcaaatgcttgcagcatcttattgtatgaatgttcaacataagcatcaacaaccaatttttcacaagtttgttgttccatcatcaagcctctttggaagcgacctgctttacccgtagccattggttgaatgccatcagcaccaaacaatgctggtacttcaacaattgaatctggatccatattagaaattgcaccgttattagcacagttagctaagaacttttcatgagtgttaaatgcgatcgcatgacaaatatctacgatatattcagagtgcaaacctgaaatatcccaaatattattcttagcagttcccacctttacgattctttcacattcgccaaagacaatcttttgccggtgttcacgaatttcatcagtacgagtatgcttcggatcagcattagcaacttcatattgtgggaagtagtagtattgcatgtaattgtttggcaaagtttctggctctagcttatattcatcggcaactttcttaaaggtggcttcccaagaagcttcagtatccttgtcgtaatcgccacctacccaatagccgtgctctttgacatattccttcaacttaggcattaagtcttcgccagtcttcttgttgcgaacttctttccaccagccaaaatgattcaaaccataatagttaaagtcaatatcatgccaactgtccaaaccacaaatggcagccattctgtccatatcatcaatcggcatatcacaaatgttaattaccttagcatttggacgaagacgacggcaagcttctgcaacgattgcaattgtgttggagtagttgatcatccaagcatttggtgagtattcttccatccaatcaataatttgcaaaattgcgggaattgagcgaagaccataggccattcctccgggtccagtagtttcttgaccattcacgccatattttaatggaatcttttcatccaagcttctcatgtgatatttaccaacacgaattgatcccataacaaaatctacatcagtaaaggcctctttaggatcagttgtgtaagaaaacttaatttgaggtgctctttccttcatgataatttcaacagctttggcaatcttttcttgccgttcagcatcgttatcatagaacttcaactgtcttaatgggaatttatcctgactcttgattaaatcaaggacaaatcctggagtaaaagtactaccaccgccagcaataactactgaatatttcttaccatccataatctattttctcctttaaataaaactaagtttttatctctgtttcatttgccttacgcatatatttatatcatcttctcccacaaatgtattcgttttcaccagcttcagactttgtttcaagttttggaacgcgtttcactacgcgaaatatttttaaattttgccttaagcctaacaaatcaggtgtttaacttgcctttattagtaatagtgtaaaaatgaaaaaaataatcgtttcatgaccaagataaactataatttgaacattcctttaaccacaaaaataaatagtccgtatttgatgatcgtatagttttaattacaaaatacgactcaaactagtttcacttccatattttgtagtgtaattttgaaattaattataattttaatatctttctgctattttctatacaatataatatttttaaaacatatctttgctaaacgctgattttatcccaactcttagtcattagtacttgataatttacagataacttaggttataattatatatttttttatataaatttagcctttatcaaaaaactttcgaattatttattaaccgtatagtttttattttaggtcgccctaagtcttgataaactagtactctaaaaaaataacatccatgttttttatttaacacgatacgttattaaagcttttcatgtatagactttgtttttaataatgttagtatcattccatgaagagacatataacgagctttaaggaattgactactccttaagcaaaaaaatgacttataaattggaaatccttttcgtaatataaggggattaagaaaaatgacaaagaatgttaagctattatcacttatcggtatcgcagccgctttagcaggtggaagtgttgctatttcaaataataacaactctactgttcaagctgcttctatcacattacctgctggttacaccaagagtgccattattaaatggaaccaaactggtaaagcaagtaaggctttgattgatgcttctaaaaaaggcatgaaggaaaacaccaatagtgatgcgggttcagataatacgttagttaacgtgactaaattaactgcgtctcaacaaaaagaactgagccaatacactttaagcttaattaattctgcacgtcatcaacttggcaagcaaggctggacttacaaacgaggtgctttgcactttgcaaatcgtgtagctaacgaatactacagccataacagatcttgctgggatgccgaccactatgttactggaattgaacgcgcagctaaggcttctggccttaactcaaaagtaggtcaagtctacgaagatgaagctggcttacctatctcttcaacatacaatactaacttacgtccaatgtcagtattgaaaaaccaaatttactttaacgtaaagcaaatgctttttggcggttttgcaggctctgacagtcagatgaatgactcatctagatacactgaatgggaacacgctggtgatttacttggttgccgtactaagagctacgatgctaagactaaatactttggtattagtttcagtggcttaaagggtgaccaaagcaaggttagtgttcacatgatgggtgttgctaaatgttacatccaaaactacagaaaattcaatcattaaaactaacgctgtagttaaaaacttaatacagtttcctaatccaagagctcaagtagttcagtcaactatttgagctcttttatttttgcccatttttcatcaaaatcctgtcaaaaaaatgcagatattcacacattttcaattaagctatctaattgtttgtatacattagctaatactaatagtgtgttaagttattatcttattactattttgtctataatccttgataaatcaatgtttccgaaactgtcaaatcttttgtgtaaatagttctttctcgtaaattgattttttaattatttatttaatcaaagtaggattctaaggtgtcctgaacctgaccaaagcctttatgaattcgattgaaataacggtcattgtagctcattgcctgaatgccaataaaagcatcaagcgactgttcagttggaaactctgccttaggcttagctttgcgcttgatcacattgttaaatgattcaatcatgttagtcgaataaattgaagctctgatctgcttgggatagttataaaagaccagcagatctggttctatgtctttcaagcttctgataacatggctgtaaaccttgccccatttggtatagaagtcatgcaggacagctgtggcttcttctttgtttgtctgttgatgcacctgtttgaattcgttcatgatcttttcacgatcgtcgacgcgtactttagcgcagatattgcgcatgacatgaaccaaacagcgttgaaaatgagctttaggataagtcctggccaaggctgttttcatgccaacaacaccatcagaaagaaaaagctcaacttgctttaagcctcgggatttcatgttttgaagcatatctgtccagacttcaatgttctcgctaggtgcaatgcagtagtcaatgacctccttgtgcccattaggcttgatgccaatggcaatatagactgcttcacgctcaaatgtttctcggcgcaaaggaaggtatgtcgcatccaaatagacgcagaaaaacttgtcgcttagcttgcgtttgtggtaagcctcaacctttggaatcatctgcttggaaatatttgatacctgagctggactgtaatggctgccatacatcttttcaattagatcggctatttccctggtggtcacgagtaaagcttgataatcatgctttccaagatatccgagtgctgcttgtagccaggcagcgtgtgctgatgaaattgaccgttgcgatcccgaggcacttgcacttcaattgggccaaattgcgtatcaactttgcggaaataagcaccatttctagagttgccagtattccagccatttctggcatagggatcatagcccagaaaggcggtcaattcagcttctaacaagttattaacagcctgttgtagctctttgcgcaataaatcatttattttgtctggattgaatagagcttgagcaaaatctttggtaaaatcattcatgaaggagttcttctttctgtatgtgtttttttgttcaaaccaatcatacgagaaaggaactcctttttctaatgtttaaagaaataaatttaaggaatcattcatccttacacaaactattttacagtctcatgtttccagcaataactgtacataattaacaacagtacagcaaattatgattacaattaataaactttttcaaaagcatttttacgttatccatgcgggattttcgcttacacaatctattacattattgttatctaaaaaaaggattgctatattaaatagtaactggtatattctatatcaatatgttcaatgaacataaaaaagggaggataaagatgtatttcactactacaagaagaaaaactaggaaagacaggatacatatccaattctttgcacaagtcttaaaaaaagacctatcacaaggaactgtttacaagtattcagttcaaagattctgtgaagctgcaaatatctgtcgcggaactttttaccgcaactttaaaaatttgaatgatctatttagtcaagtactgcaattcgaaatcaattcttgcttcaacaatccccaatcaagtactttacataaaaaagcacacaacttactgatagaaattgaaactaatgccacctactatcgaaatgtacattctcttgcctcaagtcaaattcgaacacaagttgaccaagctctttttcgtgaaatgcaaaaattgctattcaatagtaatctttctaataagcatatccaaagcatttccagtttgattcttattcgaattctagactggattgctcatgactatcaggacaatgtcatcacagtttatactgacgttgaatgcctttttctccatcacattaaaaaaagttgctagcaacgaatactagcaactttttacattaagcataaattttacgttttaaaataccgacataaggtaaattacgatataagccgttatagtcaagaccataccctactaaaaatgcatctggagcttgaaaaccatagtaatcagcatggaagtcaactactctagttgtcggcttatcgagcatcgctactacttcaacactagcagcaccgcggtccttcatcacttcacttaaagcttgaagcgtacgacctgtatcaataatatcttccataaaaattaccggttgatctttaacatcagattttatatcttgagtgatctttaccttgcctgttgattcggtaccggcataacttgaagccttaattggatcaactgtcaatttaaagttaagtcgcttgatcatgtcactagcaaaaatcattgccccatttaaaacgggaatgacaatcggctgcttgccctcatatttttgattcaattcagcagccatctcatccatgcgcttatctaattgtgcttgatcaaacaaaattttctcaatgtcgttattcattatctgtctaccctttgaattcataattttaccaatgatccgattctagcatgattttgaattgatttaaagctttttagtgcttaaattgcataatttgttcatttattgtctatatggactataaattgttcgggtttagtggaagatagtgttttagtaattgaatatcacttttttggataaacataaaaacagcattctttcagccaatgctttaggaatactgcttttatcttaaatcttcttaatcatatggtcataagtacgatcgccaatcgtcatcgatttttcaatttcataacccttatgcttgtataaagcttgcgcacgtggattttctttgtccacatttaagctgataatatgatagccatgagctaacgctacttgttctgcctcgtccatcagacgactagcaatgtgttcaccccaatggtcgggatgtacagctaacgcatcaatataccactcgtgtggccaagcttcttgatcatcaaaaatcacggttgaaatgagtaaaccagcatttgcatagttatggcgcaagacaacatcgataatcttctggtccttataaggatacatatctaaaattccggtcaccttaccatgatcttcagctacccaaattcggcggtatgaatagcgataatcctcggaaatgaaccctaatttcattaagctatagaattgatcttctggcaaagattcaatcgacttcatctgcatttcatcaaaaatttgctttaagatgggatatacaaaaggaaaatctgtttttcttgctcttctaatcatttttctccctcaaaaattactcatcgtcatgatcattatcaaacaaatcaacatcatcaactacgtcaaacttaattggatgttctggctgatgcttcaacatgtcaagcaaggtagttgccttaggttccaataatttgctgtcatgcattaaacgatacagtgcaaagacctgtgcatatgtagcccgaatcagcaaaccatcaacctgataagcggcatcattatcgtctactaccattgatgtagtcaaaaagtcgcgcatctttctctctgcataatcgtcacccatcatttcctttagtgctggatccatgtcggcgtatgtatgtgacagcttagtaactcgttcaaaattgtaagccaaatcaacattaatccgttcaagactgtcctggtctaactggccttgattcttgcggatttcattagctaaatcatcgattgcttcaccaaatgcaccaaaaacataatcaagtgtcaactgggtctccaactgctctggttccatatcgactaattgtgctgcattctgtgcattccaggcaaaagatgggctcaaaactcgtcctggtgtctggaacaaaattcctgtcaatccttgcttagcagaatattgaacgttaattgaaccaggctcaaaatcacaacgtttggttaaatttcctgcggcagactgaatcttagggtatagttttgctacaattcctgaggtgtcgccttgatcactgtcgatgacgattgaaccgttttgccaggtatcatgcggattattttcatccaaaacagagaaattcgggtcaggagtaaaaccggcatcaatgtcttgattaggtacataaatcagggaatgacctaagaaattagtgattacatttgcatcttgatcgtcactgattgagtcaatataagccatcaagctgtaaagatagccatagcctaacttgttgataatctcaattaattgatccttatcttcgttgtcgctagcttgaacgtagctattcagcttttgccgcaaatcatctagcgtccgttcattggtgttagacaagtagccatcgacgtcagggatgctgtaagaaaagccgaaaactaagcgatacaagtaatccagatcggcacaataagcgtcccaatcatcatcactaatctgacctgccgtatcttgcaaatcgcgggcaaaattaaggataaacgaaatggctaaatgagccgcacattgctctacactctcattttcaatcattgttgcaatcttagtacctagaatatcatttcgaaaaatcatcacatcattaggcgactgcaaatacacaatcaaatcgtgctgctcttcgtcatattccacgccaaaagaatctgcagggatgagattattttgcaccaatgcttcactagcctgacggaatttagcagccaatttttcagcctctggtcgttcaatcggatcgcctattagattgctatcttcattgttacccacggcttgatcagccttatccggcgcattttttaatagagaaaaatcaggatctggcttgaacagatacgaatcattcgggatctccattaccatatgatagaccacgcgaccagctgcttcgtcatcatcagttgaacgttgcacttccttaggaatcgccaataaataagcgtcaggcattttggctaattgagtttcagtctgggctaaaatatctgccccatatagaccactagctgctaaaatgctctgcaaattttctcgcacatcggccgtggacattttatccgtgtcacggtaatagctgttaatttcggcatttttttgcgtcaatctataccaagcgttgtatagataatccatatcctgacgtagctgcttaggatcaagatccacacgctcttcaggcttcgttgcgtccataaaactgccagccaagctaacgataatcccctcaccgttagaagcatcatcttgttcaagaatgtagccataagtctgatcattcaagagcaggctaggaatagtcaagttgttaggtgtctgtaagtaaatcaaaacactgtcatcatcaggattaagttcggcgctcaatgaattagggacaatgctgccgaggctgtaaatccaaccgattgcactgtcgattttgttaattacttgttttagttttgcatcttcagtcatggaaaaactccttcattattatcgaaaaatgctgtaagcaattacattttcacatatttacgcctcgattgcattctttttgccggttggatttggtttttggggggtgaattctattttttaagcagggaggggaataccaaaatattatcaaacaaaaagtcctgctttcatagatagtacaattttatatatttgtactgtctactaaagtaggactatatcacacaagccagcgtctttaatttttacatctaagccgcaggaatattcttcagctcattctgctcggccactctaaagaatgggagataaatcacaatacctattgcaatcaaaatacactcaaaaataatgtttctccaatccatcgagctcatgtaagcctggaagaagaatggagtaaacgatggatcaacaatataacccattccaatccagtgaagactttcagcaaagtaagtcaacacaatgttaataactggtgcaatcaagaacggtattcctagaataggattaaagcaaattggagtaccaaaaataattggttcattgatactacaaatgcctggaataattgaaagcctaccaagtgcacggtacttttcaactttactattcatcataagaatacacaaagccaacgaattaccagaaccacctaagacagcgattctgaacatttgcaaattcatcaaatgagtaggagcaagtccctttgcaactaatgcagcatttgcaccagttgctgctatacctgtagcaaatacaattgggaaaatgacattactaccattaaccccaattagccaaagcaaattacccagagtcacaatcaaaatgtaaccccataagctgttagctaaaaaggtagctggagttaagcatttcattataaaggtagtaaaatctgcatgagtcattccaactagaattagatctgcaccatagaaaataaagatattaaccagtaatggaatcaacgaattaataaagttagctaccattgggggaatagaatctggtaatttgagcttaaaattacttttttcaattaaacgattaatttcaactgcaagtagtccaataataattgcaacaaataaaccattcgttcccaaattattaatgtcgatcttattatttttatcaacagttgtagtgaccattaagaaagtaactaacgaaatcatcccatcagttgctggatgctctctgcggtatcctttgctcaattcatatgcgataccaaaagcacaaatcatcccaaacatacccattgtcatattatatggaatagtaatttgagcataatgagcgactgcccaatatttccaggcagcaatccatttcatgaagaaattagctgttgctggattatatttatccataacaattggagggttagcaacaattaagaaaaaggaaccaattacccaaaatggcaatccgaaaagcataccatttgaaatggcctgtaaatgcttttcatttccaagtttttgtccaataggcgttaaaactttatccaatttagtaatcagtgattcttttttagcagtagtttcggccatcagaaatcacctattttctttactaaaacaaaacgctttttaattaaatttgatatggattgaacttgaatgcgttcggaattaccttactgtcatcccagttttcacgaatcttatgatattcgtcccaataatgattattcacctttaattgcggtgtaacttttgaatcaacttcaaggaagtgcatacttcctcttcccatcttcttgccacgtgtagtatgcttgtccaaagcataatccggaatcttagggacatagcctaaagcaaagtttttgattataatgttcttaagcaaatctgatgaacggtctttagttgattcacacagatagcgaatagcgtgaacaaacatcatagcacgatccggttcgttgtaactaaagttttgacgcatctgatttaagctattgataagaattggagcttttggattacccatgccgatatcttctactgaaattgcttgaagacgacgccataatttttcttccatttgtggggatgaaatgtacatctcataagcaaattcacaggcagccctttctttgcctttccgaatcgatttttgtaaggcagagataacttcatccgcagctaatccattacgtgttcttgttcttgcccatggatcagctaaaaattctctatctctgttttgtggcacttcgtttttcttaacatcattttctgacataatgagtccttcctttgacacacgaggagaaatacaatgaatattcaaaccatctgcgagaaatatcaacttaataaagatgaagaaaagatccttctttatatgaacgatcaccgttcagagctgaaaaatctaaggattcgcgaactggctaaaagaacattcacttcttccagctttatcgtcaagacctgtaaaaagatgggactttcaggatattcagaattggtctttctaattacagatacaccaaagttccctaataatactgaaaatgacttaaaagtaagatcttgcgtaaagcctttctccaatttgatggataagcataaagactcaatgatcatgatattgggcagtggcttttctcaaaatattgctaactatatgagtgagtatctaaatttatacggttttagatgtactgcaaattcacatcttgaattactccgtaaaaataaagacgctctaataatagtaatcagcaattctggagaaaccaaacgtttagcagaactgtgcattcatgctaaacagaataatagagatattctctctttcgtaggtgaccgtaattcaactattgctaaaaactcatcacttgtaatcagttcagatacgtttactccatcatcctttgatagtcattaccctcagctgttttttggtctaacactcatctattttgaattattaatgagttactttttgtctaagtaggtacctttccttaagacactttcatcataagcgctaggcaattgatttaaaaggttttagggcttattgaaaacatattcttatttttaaaaacaacctgaattgtcaaattaagtgcaacagttaggctatgaagaaatatattgcttgaagagttcttctgctgtgtgatattggaggattcagcgatatttgtggttaatggcattggttgcctgttgaacataagcttttgacttgtctttcatgctcttgcccttagagaagaattgacgcaaaagaccattgcagttctcattggtgcccctttcccatggagaatatgggtgagcaaagtaaatctggcagcccttgatcttggtcatatccgcaaactcagagccattgtcaaacgtgattgatttaaaccagtcaggatgtctgtcaatctccttttgaagcagcctttggcatgtacttgcccgatagtcaggaatcttgataactacttcaaagcgtgtggttctttcagtcaaagtcattaaagcaggctgattcttgcgtctgatgcctttaaccagatctccttcccagtgcagcggagcttttctgtcttcaacctccttaggacgctgttcaatggaattgccaagatgcttcttgtgcaaagcgtgaccgccatggctgtgatgacgcttgttcctgcgtcttttgagcttcataggcagatcaatattgcttatgtccaccaagccctgatcaatatacgatagacagtaggcgtgctgggacaagggtagcctggcatagtccttttgaattcaccaacgaattcatcaatgctggtggcatcaaatttagctttaaagcgtctggagagcattctcaaaaaaacagcataatgctttaatggatcccgtttatagtagtttctgcgtcgcttatcatgatagatttgtgcaatatcagcgtagtaatgctcatagagtaaataattatgatctctttgcaggacgctaccacgtctgatttcacggctgatagtcgatttgtgacagccaacctttcgagcaattgcggaacaggaggttatgcctgaatcaagcatagcttgaatttgtccacgctgctcacttgttaattgatgataatgtctagagacgctagaatttgaattagtcatgaagatcacctttcttgatttttggtcacttcaagttcaggtcttcatggcctttttgtttaacacttagtgttgcataaatccgggatcataaaaaataaccaacatccattaaaaatgttggtcataaatttactaaatattcttttttattacatcttccgaataaacgtgttcatatcgtatgggcctaccttgtagtcagagcgatccacttcttccagagcatttgtcttaatatagccctttttcttcaagaatgaaagatcaatagtttcactagtcatattggacaaacgcaataccatcgtatccttgatagtataagcaggataaagtgctgaaacttcaataccatctagtaagttaaggtctaagtaggattcctcatctgtgatcttcggcagattatctggaaattcaatgtcccagatcttgttatccaaacgatttacaaacaaattgtacttttgaatttggtaagaaacatttggactaagccatttatcaagacgtgtggcaatattcttttcagacaactcttctccagtaaatggagtaatgccaaactcaaaatcgttattgccaagttcttctgccatcggtgttggcgtcatgacatgtcccactgaagtggtatcacctgaagcacgacctggccgccacaataagtttgacttaccaagttgaccagtcgttgccattaatgttacatagatagaatcatcaactagctcatattctttctcgcctttgccaaagaagtagagaccatttttaccgtcattttggcccacagctcgatcaaaaatataaatattaactggcttttctacaaattcatcattccaattatcatctattggctcattcttagtctttctgaaaccgccttgaatttgagtatgagcatattcagtttgcatccttgacctcattctcaatcttaaacgatgagccagcacagtattgtttatatgcagacgacaggataataccttttcgccattggttagggaaacagtcaatttgaatgggacttctttcttttgcccatcttctttcaaacgatcatccagactgtaaggcaataaccatttaccttccaaaatcagttccttataggttgaggtttctttcttggttagttttccattccaattaagtctaatctcgtggtcctttcttagtggtgaaaagtcatacgtatcgccatcatttgcctgatcatagacagagataacatcataatattcttgattcttatctctcaaagtaaatttgccatcttggtaaacaactgtgagttgatcattggcaattgaattattgtccagctcttgcaaactagttaattcttgatcagcgtcttcaaagtgaattaccttgtaacccaagccattcattctaagcttaattaaaacatacagcttgtagtatccaggctcatctttaaactcaaagccgtttggtgtcaattgcatgatatttggtcgagttggagtatatttttctttaaccaaagtagcttcatatttatctggaaatttgatcttttttgaagctgacatgaacgtaattaatttataaccatcaaaatcataaggatcagtattaaaaactatgacatctttatcagttaagttcaagcgttgagcaattctctttttaatatagttttctaagccatcagcaatttcaaaagcctgcttaaatctgtgatcaatatcaactgcaacgttatcagttacactgcctcctaaagtatcgtgtggttgagaatcaaataattgcttccataatttaatcaataatccattggaaacttgaatacccgactttttagcgatcagcatcagaggctctactcgtcttaagatatcttgttcaagcttaaagttcttgcgcttgtttctggatctaacagaagcaatagttctatgcactcttgaataagttggatatctcaattcaccctggtaagtattgagtttctttgaacgaagccgtttcataaattcagggtacgtactaatttgaacatcatttttgctatattgattaatctttttaaccgtatcagagatgttatgaactatattcatctggtcaattcctgatgggattaaaacctcatcattattaccattcttagcctcaaattcaatgcctttgtccaatcgattcttaacaaaatcctttaaatttttctttgaagccaagtcaatctgacctgtatagtatcctaatggaaagttagcagcaaatacaactgaatttcctaatgcacgccacttgaagtaaacagaccctgcttgtctcttaaaattagtaccacgccaagaaagaaaatcatgaattcctacttgattaagaatcattggtaaattggcattaaagccgaaagtatccggcaaatagcctaacatcattgccctaccataatattttctggcatcattaataccaattaccaaatttctcaataaagattctgcagcaggaatatttgcatcagtctgtgtataccaagggccaataaataattgacctctttcaacaaggtcatgaattctttctttagcttctggatgaatttctacatattcatcaatgattgacatttgtccatctaaagtaaaattggcttctggatgagattctagttcatcaagaacttgagtgaataattgatcacttaatacttgagcatcttgagtggtaaaataccattctctatcccagtgtgtatggttaactaaatatgctttaaccatgttttgcctcctatttttcatacccaacgctttgaattattgttcttaacacgtctttggtttcattaattgttttacatttatcaattaaatttctaaactgttgattttgttgcaaatcaactaaaaaagtaaatagttcttgaatgttcggatagtctttcttattaacggaaatcaaaaagacatacttaatcatgtttttatcatcccattttatcggttcattcaatctagcaaagcttacctttgattgagtggcagcatactttatcggatggggaattgcgattccgccaccaatggccgtagaatatagatcttctcgtttatatacattgtctctaaagtcgctttcaacataatgatacttttctagatcatctatcattagatcaaggactttttccttagttaacttatctttaagtaaataaatcaatttaccatcaaacaatgtactgagacgtaaaaagtagacaattaaaatattggattaatagaggcttgacttcgatactctttcggggttaagccttttaatctgctctttatcctttcgttgttatagtattcgatatattcctcgattgcttgagttaattcttgaagattatgatacttgtattcttgatcatagaacatttcagttttgagcaggccaaagaagttctccattagcccatcatccatggagttgccctttctggacatgctttgagtaataccatggagttttaaagctcgctgataacgagggctttgatactgacagccctgatcagtatgaaaaatgcagttattaagagctgtttctttggcaaaagccttgtcaagcattgtcattactaaatccatatctggatgtttggagatagtataagaaactatatcgccaccgcagccgtctagaataggcgataaataaagcttttcattattaagatgaaattcagtgatatcagtataccattttgtgttaggcagggctgcgaagaaatcacgatgaattaaatttggagctattttgccaatagtacctttatagcttgaatatttgcgcttattgcgcctgatgcctttaagacctaatttatgcatccaatagcgaacggttttctccgtaactttccagccctctctgattaactgcaaagctactctgcgatatccatagcggccttgatgatgattaaaaatctcatggattctagcaataagctttgaccgtttaggcttgacgggctgtcgtttgataatcttgtagtatgagcttctggcaattataggtagctcagggtgctctgcaatcgcagctaatacataatttaaactaactttgaattcttgccttagatccgtaatcaccctagctatttcttctgatcttcttggtccaaggcacttagtttttttacgtattcgttcacaatacgcaatcgcaagttttcttctttcagctgctggatctctttctccagttccttgcgagatttctgcttttctttggtcacgggcagggcgtcctttctgtttgataatgacattatacccgtttttcttatattctctaatccaattgttaagcatgccaatacttttaaaccccagttccaaagacagctgtaagtatggtttattgccaaagattgcttgttcaatagttcgctgcttaaactctttggaatagctttggtttttagtagttaaaatttctattccatgcatatcaattaatctaagcatatagtctaaattagctagattcattctgtacgctttagccaattgactgattgagatattttcatctttccatttatgataaatttctattttttgttctttattaaatttagacatagtaaacattctaagctaaatagtgaattagttatccgacgggataattgattcactatttttattcttttgtagaattaaagtagtggtaaaacgatatgccctgaggtctttagacacttgatgtcgcataataaactggcagttttacttaagttttcaatagtctcttcgaagaatgtggacactagatgtcgagtttagaaaattagatctgatttcttaagtaaatacgttttactactaagttttggaggtttttattatgcaagttacttttggaattgatgtaagcaagtctacttctactgtttgtgaactaattggtgaaagcaaaaatgaactaaccattactaataatcgtcctggttttattcaattgcttcatgaattaaccgctttttctaaacatccgcaaattatttttgaagctaccggtgtttattcacgcagactgcaggcttttcttgaagactacggctatgaatatgttgttattaatccgcttaaagccaaaaaagagatgaatatggggctacgctacaacaagaccgataaaactgatgcttatcatttagctttaattcaaagactttatcgccatccggttaatcaaagcgaatcccaaacttataagcagcttaatgctttgagccgcttctatgaccagctgacaagtgacttggtaatagctaaaaatcgacttcaccaagctctacaatcgacttttcctgaaattgaaaatttattttcttctgctagaggtaaaaattactggcaaatagttgtgcgatatcctcattgtgacttagtaagaagagaagataaaaaacagcttattaactggttaatgagcttaaaggggattgcttttaaacacgctctaaggactgcagataaattaattgaattagcttatcaagcttatccagttgtatcttgctctagcatagaagtcgagcaagtgcagtattatgcacacagattgcttaatttaagtgatcaaagagaaaatttaatcgcaagaatggttaagttagcgaagtctttgcctaatcatgatttagaaaacctagaaagcattccaggctttgcacagaccactgctgtcagagttttagcagagttaggagatttacgcagatttagtaatcctaataaaatcaatgcttttatcggaattgatccaggcagatatcagtcaggagaaatggactctaatttaagtattactaaacatggcaatgcagtcgcacgtaagttgctttatcgagctattggacaaattgataatgcagctaagacaaatccgtgtcatatagcagattattatgaaagcaaaaagctatcctctcaaaccaaagggttcaaaaagatagctattgcttcaattcataaactaatcagaaccatttatgccctgattatcaatgatcaaccatatgattacaacgtagccacacataatcaaaaagactttagtcgtaattaattgatcaagtacattataacgctaagcccaaaaatcagatatggatctgggcttatttgtcgtgtctaactaaaaaaataaatcgacactaaaagatgtttaagttgaaatttaaacaaaaaatgaagccaaacttcttattatgcttgactttacgtagaaaagacctaaaagtgtctaacttttaggtctcagttcacaagttcataatgaccttatttttatccgaaactgaaacgaggtattgataaagttcattactatcattctgaaagttagataaatctacctgaattactggtaatttactttcataaattggcaccgttgaaattacaaagtcagtattttttaaatcactatgctgatattcatataatgaataaacacccacaatattcaaatattcactaaattgcgaagataatctagcctttagtaacatagcagtagcagttcctgagccgcataccaatgcagctctctttttatcccaacgattgttgtataacctttccattgaagcaccaacatgaagtgtgatgaaagctaactcatccggggataatttcatgttaagttgatgctctataagtggtgaagctgtcactgtcatttcataagccaatgggaaagttgaaacaattacatttagtaaaggattctttctttgtccattaatatttttaactttcagtagtaattccaagtgcttctctaaattacgaattagttctttgtcttgcatgagattgaaaacatagtcgtccttgattctatccaagaactcaatgacaatgtcatgtatctttttgtttttcacgtcattattactatgctccaacataagttgtggataatttagagctaggtgataaataaaataatgaaattctgcttcactatattccaattcatagctacggaaaacttcctcaaaaaacttagaaaccttatcaaaatattcctctctaatgtaagggatatttcgattaaaattacgaagctgattattagttttgctgcgagctaactccaatgctaagtgaatagtgatatttttatcactataatcagacataggaagccccagagctacgattaaattggtaacttttgtcagtaacttgtttaaatctaaatcagaaaaaatcaccttttctgatttagagaaacctcgaacataattattgcctcttttattatcgatataatcaataatgcaactacgaatatccgattctgaacctttcattcttaaaagatcgccatctttttgaatctttagatgatagtttttggctacctttctagcttctttcaaatacttatcaactgttgaatcactgatatacatagtggaaataatgtcatcaatctcacgcggtttggttagaatcaaaagaagaaaatcttttaatcgttttttatagtcgtcaccaccatctgtaacgataccactttctttaatccgctcgaccaaggacttaaacttttctcgatcattaataagtagatataagccatgtccccgtttattttttattgagacatcgtatatcttaagagaattattcaaattcttaatatcgcttcttaaagttctagttgtgacacctaactttgctgctaatgctttaggggaaatataagtatcattatttttagaaattaaagacgttaaaattgattttaagcgtggttgtgtaatagacatgcaaaagtcacctcatttctataaaatgtagcttatcatattatctaatattcataataaatagatactatcttatcatgtgtaagcttaggcaattttactgtattatttactacctctagctttttaagtggctcttcctttaaatctactaattctactttattaggagccttgttaaatttgagttcatcttccttttctttaaatgaagcattgtacagtcgaataacgtatcctttacgctcttctgctttttttactgtactagtagtaaattcacccttcgtttcaaaaagactatattcttcagggagctttcttttgactacattaaatggaaagattaatcttccatttaagaattccgcatattcaaacacttgcaacccagtcttaaattctttggcgacattagttacgtttgctttttcaaaatcgcaatcagtaatatatactccaaaatcaaaacttaagaccttcttcaattcagcagcgagagttgctacagtagcatcccctgaagctcggccagggcgatacaataaatcagcttttcctaatctgccataagttctgaataaggttaatcgaatagttgaatggtgttttccaatatcttcgtactcacgtacaccgttagggaaaatagcaaacatattgttcttatcagataatgaagtataagtttgcattgtattaatcgaaattggcttttcttgccaatcatttggatgttcttgccaatccaatattgccttcttcaattcaaatggtctcttaatgctgccaaattgaatatcatcaattgacccatcagtcactatttgagtatcaaaatcaatacataaacgatggtctaacggttggcgattatctgtaactaccctaaatccaattactgggttatctttctttaactttatctcaagagataccggcattaagacaaatgcttttctatgtgcacgttcatctaaatcagctggcactctaaaatcatagtcaatcttaagttcattaagcaaagcagatttattagcttttactttaaatgcttgatcggtagaataaattacccaatcttttttagctggtgaatagttataagaatctccatcatcgccgttgtcttctaagatagcttgtttatcgaaaacgcgcccatctgtttttcgggtgattcttaaacttccatctaaatttacttcaattttgtaatactcattttcaatcgtagtttgattgcttactgacagttcatctgcttttcctacattaggaatcaagtaatattgttgatatcccattggaggaatatttttgactactaggctaatctttgttttataaactttttctggctgataaattctatttcctgggtttaattgaacagttgcaccattaacttcttctgtttcatctttaaaaccggcaactacaaagggaataggttctccatctttatcttgaatctcaaaattctgcgctggagtgtatatggttttagtaactaatccactttttgcaacaggagtggtattgaagaccgttaacgtaattgccttgtcgtcaggtttttttatctgaaccgagatttgccgcaaagttagttcaactaaacttgttgccatatctctagcttgtttatatcgtaaatagatatcttcattaacattatctgaaacactatttgccattgaatcatgtgcagaattttcaaacattttttcccagatatcatcagctgcacctttaggataggaaataccaaattgggtacccaaagttaaaacaggttcaagaatgttagttaggtagtcttgaattaaagtattcattttcttcaaatcagatcttgaagaatagtttgttttatgaactctcatattcttaccgatattgaattcaccttttaacatgttcagcttaggtgctaccttatcaactgcagcaatatattcttctaaagaactaatcttaaatttaaaatctttatttctttcatttaatttttctattacttgaggtagattatttctcgctggtgccatatcagaaccttgaggaaaaagaatttggtctgttgttgcttgtttaactacactagcaaagggctcagatgtcataatcttatctaaattattttcatcaattagaccacctatgaaataaccacaggccattcgataaacattaattcgactgccatcttcacctttccaaataaattctgaatgcgtagcttcataattgggaaaaccacgccataaaacagctttatcaattcccaaccccttatagatttgcggcatactagattcctgcccaaacgaatcaggtacatagccaatattcatgtagcctcccaacttactacatattttcattccatataaaagattacgcactatattttcaccagatggcaaaaactgatctgtctgtgtataccatggaccaataataagttttttatttttaacaagattctgcactttctttaaatcttgtggacgccattttaaataatctgcgatcaaagatgcttgaccatctaaaataaagtgattaaaacctacattgttttccaaattattaattacatcttttagatcttttaataagtaaatctgtgcgcgagaggtagtaaaaaaccactccctatcccaatgcgtatgtggaactacatgaactgttttaaccataactaaccttcttttctaataaaaaagctatagccaaatttaaactagaggggaaaagtactttgttattgactatagctttttgtttatttttcaaattaactgatttattcggtagtaatgtctaacttaatatcgtcctcgctaatctttttaccgttgtcttcagtgaagttggcaactaatggagcaacaacggcaataaacaaagcacaggctaaaataccacaaacataagcaggaatattatcagcagttaagatacctggaataccacccaatggaggtatgtgtgaacttactcccattagttcaccaacgccagcacctaaagcaccaccgattacatttacaaagattaattgtggggctttcatccagaatggaatagcaccttcagtaataccgaatgtgccgttgatcaaatttgtacgccccatttccaaaagttgtggagagaatctcttcttaggccaaataaaagtcattaaagcataaccaagaggaatagcacaaatggcaatattagtgtaaagacatggtttgtaaacaccttccaggaagaagaagttaccagcagcccaagcagctttattgacaggaccgcctaagtcaacaccaatcatgccacccataataagagccaaaatcaaaccattagtatggtcattaaccattgttttaatccaagccaacaagccagtattaatccacgctaatggacctgcaagaattaacccattgacaatagctacagcaccagttgttaacaatggagttaagatcaattcattggcagaattccacttttcaggaacattaatatgtttacgacaccaacgagcaacgtaaccagcaatgaagccagctaccatagctccaataaaaccttgttgagtattagtagctaattgaccaccaataaaacctgcacccaatgctggtttatcaccaatggcataagcaatataaccaccaattactaagttgaccaagccaatacctatccaaccaacttggttgacttgatacagcatatggaagaagccagtagctttagcaaatttacccagatcatttacaccacaagccatacctatcaattgtgggataccaacgataagggcaccaccaataattgtaggaatcatgtaggaaatacctgtcatgatatagccttgccaatcatgcattagtttcttaaatttcatcattttactcccttcatttcaaagtagttaaacattattctgttaaactaggcacctttgactacagaaacgcatttcttaagaagagcttctggagcttgaatacaagtattaatatcaactctgataactttctttcccttaaaacgatccattccttcgatcttttgatcagagccaattaagacaaaatcagctttctgggcttcttcaggtgtaatttcatgaactcgacccataattccttgctgctcgatcttaacgttgtaacctaatttctttccggctaattctagtgccttagctgccattggcgtgtgagctagcccagctggacaagaagtaataccaacaatatttacatcactcataatttattagctcctatctttttcctaatatactttgcaatttcttgtgaatcgtttaatgttttcaagttttgcttaaaatcatcttccaataaagcagtcgacagattggcgagcatctttaagtgagtattacctgcatttttaggtggtaccattaatgcaaaaacatctgtaactggtttattatcatatgtcttccattcaataggtttctctaagcgaacataaataataccaactctttccacagcttcagatttagcgtgtggaattgcaaatccatcttgcaatcctgttgaatattcttcttctcgctttttgaatgatcccaacagaccttcaggatcattagtaaagccaatttcttcagcatattcagaaattttctttaacaaactttctttatcagcgacgttcacgtttaaaagaacatcttctttttcaaacttcattaaatcacctctcgtattatataaattgtaattagtcatattgtgataattaatcaaattagtatttgctttttgatcttcacatgttagcctctaattgtcattggctttggtcaactggtctaggttatcacctcctgcagttttgtctgctttataagtctgccacccaggcagttcctttatgctctaactcacatgctgtattgattgcttctttttgctagtccttgagcaattgggattaggtgcagctttcaaagaagcaaccagtgaatacttatactggcgagattgaacttaagaactgtaattaggggttaacatgtgaagatcaaaatctatgatcagaaatttgaaagaaaggaggccatttccaatgaaattatttgtcggtattgatgttagttctaaagatttacaggtcgttgcacttgattcagaagatcaaaacaaacgcttaattaacgatagctttgtcaatgatctttatggtgctagtgaactgaaaaaacaaattttagatctagctcaaaataaacactatgatcaaatcattattggcatggaagctacatctatttacagttttcatcctgcttactttttccaaaatgacgaagatttacaaaagctcaatgtagagactgatgtaattaaccccaaagaaaccagcaggtttcataaagtctttgaagaaagtaaaactgatcctctcgatgcttattacattgctttgtatctaagctttggacattatcgagtaagcattgccagacaagacaactatcttgctttagagcgtttaacgcgtaccagatatgaattagttcaagaactgactcgtaccaaacagcacttcattgaagctttatattatcgggttaataaactaatcactgtcgataaagataagattaatactcctcttttcggtgctacaatgatgtctattgtaaccgatagtaaaactctggatgagatcgcggatatgcctaccgaagacttaatttcttacttacaggttaaaagcagaggacgcttttccgatccagataccttggctaaagcaattaagaaagctgttagaggttcatatcgcttaggcaaagtaatgactgattcaattgatgcagtgctttctgttcattacaacatgattcaaagctttaatgaatctattaaagatctagaaaaagcaattgatcgtatcgttgatgcattaccagaaagcaaaattctggaatcaattcccggtattggcaaaacctatacagctggtattatcgctgagatcggaagtatcgatcgctttgataaagaagaacagctggctaagtatgccggcctaacctggaatcaatatcaatcgggagatcacagcaacgaacatactccaatggccaggactggaaacagatatctaagatattacttgattgaagctgccaatctagcaagattacatgatcctgttttcaaaaaatattaccaaaagaagtatgatgaagctgtctactcgccgcataaacgtgcttgcacattaactgcaagaaaattagtacgagttatctttaaattgctcaaagatgacaaactgtacaggacaccgaggtcttaatttcaaaaattggtctaaatttaaaagtaaacaaaagtttaacattaaaaaaatcaacctttaccaaggcttagtttcatatactcaaatttatgatcaaaaagaacaaatatcatcgcctttcatttgacttattaccacatgacttgtccgttgggccttctttgtaaccccttacatctaatatgattgcatattctcttctataagtaatgtctcctaatttccacttaaagtggaaattaaatatttataaagttacgtcatgtcctaaatagcttaataacagttcacaaaacatcatatttgcccatgaaaaccacggtcgagtaaaatcactaggatcattaggattaaaactctcatgaatcatattgctaccattggttgtgttagccattaaatacaataaattctgtttttctgctttagtctcttgggttaaccctactaatgccatacctattggccagatatttcctttaggagtatgcggacttccttgaccactccaatattcaccaatatagaaatatggattatctggagacaaaatgaatcttcttgtgttttgataaatgtcatcagtaggtttaacgtaaccaatataaggagcagacattaagctaggaacattactatcatccatcagcacatagttgcctctaccatctacttcataggcatattgctttttaccattgtgctcaacaataccatacctttgaattccttcattaatttcattttgcagtgttttagcctttgcaactatatctgaatcatccaaaatacttgaaaatatttcttgaatataatttaaaactactacggcaaacatgtttgaaggtatcaagtatccatatgtacatgcgtcatcactcggtctaaatccagaccaattcattcctgtatatgccacaggcgttcctttacctttattctttaaagtatcagttggaacatcacagtccctttcaaaggtgtagttagaattctcatgatgttgctcagttttaatagttgccagcatctttttaattccagaaacaaaatttgcatcaaattgagctgtttcacctgtgttcttatacagtagatatgccagctgtactggataacagagtgaatctaattcatattttctctcccaaatccagggacccatttttgctttatctgtttgatgaccttgattattggcagtcatattaaatgcattagcataaggatctaagttcatattaaaaaattgccgttttactactcgagtaataatatccttaatgttatcgtcagttttagctaacaataaatatggtcttaattgtgcagatgaatctctttgccacattgccggaatatcaccggttaatacaaagatatttttattttcatcgacctttaaagcattctgcaaagtatctaagaaagtcttgttaaaaattgtatataaacgttcatctttagtgccacattctgcttccacttcattcatataattctttacttgttcatcaataatgtctttcattattttcacccccagccaaattataaaacgcttttataattaaaaagaagacattacttttcaccttattgtggaaaacaaataagccattgcctgtatttttacaaagcaatggcttattcattattaaacggttattcctcacccggtgcagatataactattctcattttaccagtgaaagtgaaattcttcatctcatttggaataattaaattagttccgatcttcaaatcatatgatttgccatcggcttctaattttccttcacctttaataactgaaactaaaagatatggatgatcctttaagccggtcttccatgtaccatcgaggtcaatttgccataagtagaagtgtggtgaaacaggtggttcaactaaagtcttgatttctgcatcttgatccttattagtcttaacatctagcttaggatcaacatgtggcacagttgtaacatcaattgacttttgcgtatgaagttcacgctttttgccgtctttaccaacacgatcataatcgtacaaacggtaagtaacatcacttgattgctgagtctcaataactaaacagcctttagtcaaagcgtggatagtacctgcaggtacgtagaaaaagtcgccagctttaactggaacctttctaagtaatttgtcccattcgcccttatgaatcatttcagccaattcttcacgatttttagcatggtgaccataaataatgtaagcacctggatcagcttgcatgacgtaccaactttcggttttaccagaatcattttctaccttacgggcataatcatcatctgggtgaacttgaactgaaagattatcattagcatctaagaattttactaataacggaaattctttagccttaggattaccaaaaagttcaggatgctttaagtaaacatctcttaaagacatccccttgagtggaccctctgttacaatagaagcatcgtccttgtagccggaaatgatccaagcctcaccgacttttccatctggaatatcataattgaaaatatcttttaatttacgtccgccccaaatttttggtctaaaatacgggatcaaaaataatggttccatttaaaatcacctcatttttactttagctcatttaaaatcatctagaaaggtatggcttttctttcttttgaagaaaaaagatacacttacgaccacatatttcaagttggtttggatctataaaaagatataaattttataatatcagtcggttataaccaattaattatttatgtaattaggatcttatttcgtgaaaccgtaaaatagtttgtgtaaggatgaatgattccttaaatttatttctttaaacattagaaaaaggagttcctttctcgtatgattggtttgaacaaaaaaacacatacagaaagaagaactccttcatgaatgattttaccaaagattttgctcaagctctattcaatccagacaaaataaatgatttattgcgcaaagagctacaacaggctgttaataacttgttagaagctgaattgactacctttctgggctatgatccctatgccagaaatggctggaatactggcaattctagaaatggtgcttatttccgcaaggttgatacccagtttgggccaattgaagtgcaagtgcctcgagaccgcaatggacagtttcatcagcacacgctgcctgactacaagcggcactcggatatcttggaaagcatgattatcaagctatattccaaaggcgtaaccaccagagaaatagccgacttgagtgaaaagatgtatggcagtcattatagtccagcccaagtatcaaatatttccaagcagatgttccccaaggttgaggcttatcacaagcgcaagctaagcgacaagtttttctgtgtctatttggatgcgacataccttcctttgcgccgagaaacgtttgagcgtgaagcagtctatattgccattggcattaaacctaatggacataaagaagtcattgactactgcattgcgcttagtgagaacattgaagtctggacagagatgcttcaaaacatgaggttcagaggcttgatggaaattgagtccgatctgctggtcttctataattatcccaaacaaatcagagcttcaatttattcaaccagcatgattaaatcctttaacaacgtcatcaagcgtaaagctaagcctaaagcagagtttccaactgaacagtcgcttgatgcatttattggtatccaggcaatgagctacaatgaccgctatttcaaccgaattcataaaggctttggtcaggttcaggataccttagaatcctattttgattaaataaataattaaaaaatcaatttgcgagaaagaactatttacacaaaagatttgacagtttcataaattatctatcactagttactacttataagactaacatcttacttaatcaaactttaaacaaaaaaataagaggtgaactacaacatcgtcacgttatagttcatctcctactttaagttgtttgacaaagagtcacattagctagtctctgtctcttactacatacattaatagttaagaagtggaaattaattaccaaagcacctctatttcaatgaacctgggaatctaaattcatatgaactaatcgggcctactatatcaagactagttatttgtttgactaattcttgaaataaaattattgcgttattaacaccataattgtttactattttttggattttttctggacttttaactttttttggattctcaatatcataaaaataatccactttaatatttaaagtcctatattcagaatcattatcattttcttcatttgagcaattggcatgccccgataatgtcacaattgcatcgtttgcagaaatagccacagaaatatcatcaaacataaattccaaatagaaactgtcttgttgctgttctagttcacctttgtattcataattaagtttattaattataaatccattatatttaagctgtactgacatcgttatctcctatttctttaccatttgtggttgaaaaactgatttttttattcccacctgatagaaagacagtgtcttttgtttattagagctttcgtttatcttcatctttgctattactttagaagttttatgctgtaatgttttattatctatttcttttatttttattcgttttcttgaaaaactagataacttatttaaaacttgctgatatttttcttcactactttctaaatcaattccctgctcaacttctgtatacgtgcttaaactcaaacccgttaattttgctgcttcatctctatttaaattcaaactaattctttttccgaaaatcttttgtgataactggaattgatatgaatttaatctactattatttggattgattttattgaacttcatgtctttcgtttctccttcctataaaattcttttccctattattcaccaattgattatgaattagttcagccagtttcccaagttgatcagtaagtaaattcatttttcttatttttctttgatctttagtaggaaatttagtaaatccatatgtccagacaaaatatactttactctcatttaatgtaaataaaattctacagtttttccttacgccttcatttgtttcagaaagaaagcgaatctcatatacatgattttgtgacatcaattttttaacaatctcgtacttgatatatctgttagaatttggaactttatactcatccttaaaagaatatccaataataatcccttcttttacttcgggctttaattgttcaatattaccactactatctaaagtaacatttgaaagaaagttgataattcttaacaccgattcttgaatattaggattaagattatattcatcttctaaatattcttcggctaatttttgctcagacaagttatcatttatcaaatagaactggcgcatgggtcactctcctttgtctaaacattttacgtcaaaatcatgatattttccattctttgttgaactacagtaagtgttaatgtttttgcgatagactatcagccatagtctaaccttattctttagcttcatcaattatatcagcatccccaacctcagcacaaaagaaaaccgactccataatattccctgtcaatagctttttattccatcaaaaaaggaggacatagttctctttgataaaaaatctattccactaaatattttataaataaaggtgatttctatgtcctctcttaatcattgtattaaatcgagcttgacattaaagatgaaaatatcgtttttaaagcttgtttgaattaacaaacaataatgtcttaaaagataccacgccaaaataaaagcgaccttcgttcataagagcaaagaccgcaaacttgttaattgtctcaccacagaaattaacactcaaattctaaccttacattgcactaaaaatcaatacaactctacgccttctcaagcaaactatggtcaatcggttcgccctttaagtgggcgccacgaatgttcttggcaatcattgacttgcgtttactctttttatcgtaaacccagtcgccttgggctgtagtgatattctcaactttggtagtatcgccatcgattctcactaagaatgctggtgccattgttgagcgcttgttagggcctgaagcaaaaccacggtttgtcatgtatgaagttactaatacttctttcttgttgcctttaacgggaacagcatagtatgaataagttgaagttctccagttaaatggaacactagctaccaagaccgctgcgtcgccattaagtggtttataaccataagttaagtggtctgaaacccagccgagcatggcaacattgtcaccgactttggcatctgcttgctgccacaaatcatcaccagtaccacggttcaaacgcgttgtagcaaataaatagtacttgccgttcattggaatgatatttggacgttcaatttcgtcggataccatcaagctgttaactaatggtggtaaaacttcagcaaccttaggattgttctcattcttggtaaggcgaatgataccaatagtagcgttagcccatgttgcacgactcttcatgtcgtcattagcagtcaccttcaagaagttttgtaaaacttgcttaggcgtaccaccatagttcttccagttatagacttgattttctccttggtaattattgctacctgttgaagcttcaaaaattaggtaacgttgaccgccaacagaaatcacatgcgcatcacgcatagcaatattatctgcacctttattggtagacttccattgcttgtatgtctggtagtgatatccgtcgccttggaataaaacatgacggtgacttctcttagctatcgaaattgtgtttttcttcttgttaaccttcagcttcaagttaactgttgcaatcttttggtgattagtattttcacgggtgtctacatcagcgtagaacaattgaatactgccatctttgtttaccgtagctgagcctgaccattcttgatcagttggcttagcattaaaaccaaagattggaccagcacatttccaatggttaagattattgtcattgtacttgttatagagcaaataaatgtgggcatcattttggttagggattcccatcatggcgatcattaattgatagcctttatagttaacaactctaccagtcttagcatcttgtactggccatgaatcccaaatttctagttccgctacttgaccagtttgtgcatcacgcgtaacggttgccggcatgtttttaatctttttagcattaaaatatggtacgcgatattgcgcatcttgatcaatcatctttttagccacgccagcatattgatcatagctccagtgagtactagtatccttatcaagctcattaaagttcaactttcttacttccttaagttggacttcagttaaatccttaggattaacatctgcagttcgcaatacctgaatagtttgaggatctaacttgtaaactactgcgtcgttattttggctatagctagtattactaaaaccattagaaacattatcactaatagattgagtagtatcaccagctacttggttttgagcgttctgatcagtattagtagtatctgcaacaccagcactgtttcgattatttgtattgtcagtgatgtttgccccagtattatttcgcattgtttgattttgagcatgatcagcagctacatcattattttggttagtttgtgcttgattttgatctgatttatcttgttgatcatttgtggtcgtagtttgggtatttctttgttcagttgtaggttgttctactgtatcagctttaactgttagactgttatttatgttaaacaagccaagtaaaacagctgccgatgcaaaggtaactaatgtgcttctcttgttcatctctgttcaattttccttctgttatctcatagccagtttattataatatcttgttcggatttttggaaccttcttaatcaaattgaaatattagccaaataatttctctccatgaaaaaagccttcgctgatggataaaaccgtcatcacgaaggtacgatcattagttattatacaagattattaaaaagtgtagtattttaggacatacttgagaactatttgtgatccgtgttccagcacatctcctgtttatcgccatattaaattagaaactataatagtcttttgtatcaattttttccaagaatatgaaaagatcaaaaacctatgttcaacaaacagctgatgccattagccacttttcctttaaacgctgtctctataatattttcaagaatttttatatatcttgaaacaatttcttgtgctatccaatcccatctcactaaatattcttcaaaatcatcctcaaagtatttctcagaattgacggaatatccactaagtaagttatttttccacttagacttaacgttaggcttctcaattaaccaccatgtaatcactatatagataacggtttctacatcacaccataataaagatgcttcttcctctttcgagcatatgaataacgctaaaaaaacgagatcccatgttgaaagtgtctttttccaaaatcttccagagacaggtagccaatcttcgccatattctacttcatttatctcattattaatatatgaacaaaataaagtctctaaattatttgcagttgcatctcctataattctttcaattaaattttgtttcatttgatccaaagattgctttttcttaatatcttcaattttaaaaatatcgttaaaaaagtccttatattgtgatttcaatccacactgcaagtcaaatccatttcctattacaattaatcggtttatttcatttaaatttatttgcacttctattctttcctcctacaaatagagcatatcctaataattatacttttccttattgtcaatctctttttatcataaagctgtaatgaatttttacataaaaaagcctttgcgatagaacgtatccattaagtgaagggattgatctctctatgtttagaataaagtaatacgcgtggtgctagttaaatcgttctagacaataagccaaattataagctaaaattgcaatttccaaccggctttgaaagcctatcagactacgtgctcgattgttctcggcattgtaataggtcagaagcgaaaagtcgctttcaattgttctgcgaatagccatcaattgatgatcattgtgctttttagctcctgtcatatttttacgatatggtgtccaaagttcgtaacccatttgttttagctgttgatgcagttctttgcctaaatagccttcgtcgccaagaagatagtaattagatggatgggtattttctatcagttcaactgtctccctggcatcatgaactgatgcctttgttacgacataatcaagaatgtaaccgtcatcgctaacaatggcatgaactttgaaaccatagaagtaaattttcttggtggccttataaccaatgttggcataaccgcgaaaaattttagcacgatagtttcgaattggttggcaaacaggtaccggaaagctgtcaatgatcaagaactgtccattcaggtcaacctttttattcatttcttgccgtatctgataaatcaattgcaatagctgacgtgaacgccgattaaaacgtgagtgtgataaacaattgaaacattcacagaatcttctttgtgattcaattcctgtcttagcttgccagataagtaaagccaaaatcagactgtccgtagttttaatttgatcaatatttcgccgatgagtaaactcagccggtgcatacaaacgataccagtgccgacaaattatcactaaatctttaaaactaacttgtaaatggtggctaaaacgcttaagcttaaggcagttcaatcagatcagactcttttctattattactatttacaagtcgagtctaacaagattggacttttttattaactaaaacgatttaactagcaccacgcgtaaagtaatatatcataatgctctatgtcttcacacataataaaaaagagagctaaacgaattgatacaatcccactaaagtggacgattgaaatacataaagtattcaattatccatggaggtgggattttttatgtccagaaaaagtaaatattcattcgatcaaaagatatgggcagttgaacaatacttgaatggtaataggagcagcgttgaaatagctaaacggcttaagatgccaagtaaaagtggagcgatgcaagtaagaagatgggttcatcaatatcaaagcaatcgtgatacccttctaagtaatgctcaatacaataatcattactctaaggcatttaaagaaaaggttgttcaagaatatttagctggcaaaatgtcgttaccttctttagctaataaatatggcattagaagcaatggaacagtatcagaatgggtttccaagtataatagtcatatagaaaatcgggactatgatccccatccggaggtctatatgactaaagcaagaagaaaaactacccagcaagaaagaattcagattgttcaatactgtcttaatcacgacaagaattacactcaaacagctgtcaaatttgattgttcttaccagcaggtttacagctggacacacaaatatctagctaatggtgaaacaggattaacagataaacgaggcagacataagaagccagaagagctaactgagttagaactggctaatcgaaaaattaaggaattagagcgtcagctcaaagaagaacaaactaagaacgaattcctaaaaaaattagatcagttagaaaggatgtgcttgccggacaaccaagatacagacaagccgcaataaaaagacgctggaaacaagaaacatatcagttaatccatgactgccatcaaaagtacaattggaagattgatttaatgtgcaaatgggctaaaatagcacgctcagcttattacaaatactttgatcctaagcgcaagccgagtaagcgtgaagaacgagacaaaaagattgaagcaaagatcattgaaataaccaagtctaacaacagtctgtttgggacggaaaagatgaccatggcagttaatcgacagatgtctgatgaaaagccggtttatcataaaactgtttaccgcttgatgtgtatcaatggcattagatcacaaaagcctagataccagaagctaaagttcaagcatacaacgcctgagaaaacggccgaaaacaagttaaaaagagactttaatgcatctagacctaatgaaaaatggtgtacagatatcactgaagtcgttgctgctaacctgcctaaggcatatctatgtactgtgtttgatctatatgatcgctatcctgttggctacgcaattagtaaacgaaacgatactgctttagttcaagcagcctataagcaggctgttaaagcataccctaatgctcatccgcttttccatagtgatcgtggttttcaatttactcgcgcacctttccaaaaccaattaaaagaccaaggcatgacgcaatcaatgtctcgtgttggctgctgtattgataatggtccaatggaaggctggcaaggcattatcaaagaaatgcgagttattcttcatcctcaagtggccagttatgatgaacttaatgattctatttgtaagacaatagattactacattaatgaagatccacagaaacgttttaacggtttaactgctggtgaaatgcgcaaagaagcgatgaaaggcaatattaagaattgccctattgcaccaaatcatcgaattgagaaatactggcaaaaaatacacgaaaagaaaataagagaagccaaaaaatcctcagctgattattaatcaactgaggaataaaagctttatgtaattctactgtctacttgacagggaatgtatcaaatccagctctcttaagtatgctccacataccaacattcatcatttactgtacattatccactattagctttcaagtgttagtttttatatgtaacaagtgatgtgattaagcaaaaatactaacttatttgtgattgacgagtaaggtcttaataagacatcttaacgattcggaactatcaaggtcatcactaaagacccagctaatatgacttttagttacaataaggtatagaggctgattatcagagacaatgacacctttatcagtataagtagtgtaataacctagatggaatttttcaacatcatatgcactaacagcatacagataataatttttcacccaatcaaacttggtaggaagtgatttaaattgttgctttactaaagatttttcctcttccggaattacatttaaattgataattcgtttactgtcattcaatatggtctgatagagttcgtttagtccttttaactgttccccgttatctgcataaacaatagttgcagtattgtgagctaatgccgaattttgagttacgggactattatgaaggtgatatttcaagttccaactattactaataaaaatgtggtaaaccctatcttgaaatttagttaattcatagcaaagttgtttaattaacagagatagtgtaccttcagaagtcgctttctcaacacttttagtttgataatctcccaaactaaatatattaatttacgcgtggtgctacttaaatcgttttagttaataaaaaagtccaatcttgttagactcgacttgtaaatagtaataatagaaaagagtctgatctgattgaactgccttaagcttaagcgttttagccaccatttacaagttagttttaaagatttagtgataatttgtcggcactggtatcgtttgtatgcaccggctgagtttactcatcggcgaaatattgatcaaattaaaactacggacagtctgattttggctttacttatctggcaagctaagacaggaattgaatcacaaagaagattctgtgaatgtttcaattgtttatcacactcacgttttaatcggcgttcacgtcagctattgcaattgatttatcagatacggcaagaaatgaataaaaaggttgacctgaatggacagttcttgatcattgacagctttccggtacctgtttgccaaccaattcgaaactatcgtgctaaaatttttcgcggttatgccaacattggttataaggccaccaagaaaatttacttctatggtttcaaagttcatgccattgttagcgatgacggttacattcttgattatgtcgtaacaaaggcatcagttcatgatgccagggagacagttgaactgatagaaaatacccatccatctaattactatcttcttggcgacgaaggctatttaggcaaagaactgcatcaacagctaaaacaaatgggttacgaactttggacaccatatcgtaaaaatatgacaggagctaaaaagcacaatgatcatcaattgatggctattcgcagaacaattgaaagcgacttttcgcttctgacctattacaatgccgagaacaatcgagcacgtagtctgataggctttcaaagccggttggaaattgcaattttagcttataatttggcttattgtctagaacgatttaactagcaccacgcgtattaatttttatcttgattttcttttccacatccattttggcagatagactgtttacatcgtctttactttgatggtgcatgttcgttcctttccatattaattttatttcgatttgtgtcatttaatcataatagttctattatatcctaatatagcaaattcgttcacttcactactataggttcattctttcaccaaccatcaaaatatacaaaaacaatactggcctctcaataaaaatgagaagccagtattttgatgaggggaaattatttagttgtacagtttacttactatcttttttatctagtaaaggtttaattggttgtttttcattttgaggaacaatttgaacgtagacatcaacgcctttatcaagtaatcttctgaaacatttgtcttcttctggactagtagaaatatattgatataaggtgtcgcgtccttccttagcacccataccacctaagtcaagttccttaatatcaatgccatgatcgatcatatattcaacagtctcagggactttaactaaaatcatggtaggtgcatctaaaggttgagaaaagaattttacaccatcttctttatcaaaaacgccaataccaatatcttctggtatcgcttgttcaaaaacatttatcataaattcatttttagatgtagcatcatctacaattactacattttgcgctccagtttctttaagccatttagtcatgacttgtccatggataagcctgtcgtctattctagttaagactaagttttgcatgatgtttgcctcccaaagtagtattttcaataccccaatttgttttatctagggcgattttaattaaatcttcaatcttactttgatcatttcgggtagtaataatgcttaatagcattggtacattaacacccgtaataactgataaattatgattttgttttaagtacatagctgtattaaaaggagttccgccttttaaatcaaccaataccaaagttgggttagtttcatcatctttcaaaattttatcaaactgtgttctatattcatccggatcttggccaggcctaaatgacattgtctctaaatcatcggttttgcccgcaatcatttcaacggtttgttttattcctaaacaaaagtctccatgacttgctaatataatttgtatcaaagtaatatctcctttaaattgtggctaaaatacctaagtaagaacagagaataccaacaacgaatattcctacaacgataatacttgcattaactttctttctcaaaagccaccatactaataaggtaatcagcaatggaattaaacttggagcaagttggttaaataatgattgaagcctaataacactttgacctacatgccatactaaaggagtcttaatagttactctagttgctgccatcgtaccaactaccatcaaaccaacaatagaaaaggcattagtaactttgtctaataatccactctttaaaatagatacaactgaagatttacctttcttatacccatacataaacatccagtaaccaatactgtaaataattagttcgaatataagagtgaacataatagggccaaaatagttatgctctaaagccatagtgacaccaatacttgctaaaatagggaagataataccttgttgaacagtatcaccaataccagccgctggtcccatcaatccagtacgaacaccattaatgtcttcagcactaattttagcaccatttgctcttgcttcttccattgaaagagcaataccgtgaataactggtcctaccatatgtggttcagtgttaaagaaaaccatatatttcttcaattcgtctgcttgtttttctttaggatataacttcttgattggatgaatcatcatattagtcaaacctagcgcttgcaaacgttcatagttataagcagattcatctgattgttcccaaagccaagttttaactaaatcacctttagttaatttaactctataaacaacagttgttggttcatcattcttttcattacttggcgtagcagaaacctgatcttcttcaccatttctattttgtagcgttaatctgcgaactttctttttagctggcacatttgtcttagttgtactatttgcttttgcattaatgtaaagtaagtatgctaacagtcctgcaaagatggcgatagccataatttgcaactttaaatatgcagtaaggaaaaagccaacgaagaaatatgggaccaaattcttcttacctaagtaatttaacaacatggcaatacctaaagcgggcatcatagcaccaacaacttcaagtgcaactgttaaactcttaggaatcattctaagcattccttgtgcccaaccgcgaccaaagaatactaaacaaaatgctgggataccatatacaatggtagcaacgattaaagaaggtacataattcaaaaatctaacagctttaatattaccttttgctaattctgtatctgccttatgtacccaaaaagagttaacactttggtaaatttcaaccattaacaaaccaattaatgagaatggaactgcaaaagtaacagccaactttggatttgctccagaaagaatggtcaaagcagtaccgaaaataccggcaaccatagtattacttggcattacaccaccggtgttgatccagcctaagtaaactaattgaattgtggcacctgaaagcatccctaacataggatttcccataaatatcccaactaacaaaccagttgtcaacggataagtcatacaccgagtaatcggcgcgaagaaccaccattgagatatgatggctaaaatagccactaatattgcagacagtaacattttagagcctccactttcttttccttagaaaaaacaaactccttctacaaaattgaaaagcctaatgctttgacatccttattaaatccttgaacagtttgaagagatctttcttctggagtagttccaattaatggaaacttagcaattactggggcagttaccgtgataatatcgcaatcacattcatcagcttgaaatacattaataacttctctacaacttgcccataataaccatgcatttccactttcatgacaaagcttggcagcttctttcattaatggaattggatcaataccaatatcagcaagacgaccggcaaagattgaaacaatattagtagaacctggttttagaactgctaatacatctttgacttgctctaaagtaaagacagcagtcacgtttacttttattccttcattagaaagttttttaattaatggaactgaagattcaccctttgtattagtaatagggattttaacaaaaacgttttctccgagtgatgaaatcttttttgcttctttttccattgtttcgaaatcatcactaaacacttcaaatgaaattggaagaccttttaccttttctagcgcttctttagcaaaactcatatagtctttaacgccggccttcttcattaaagaaggattggtagtaaagccctttacgatcccactttcttttgctttaaccatatcatctataacagcaccatcagcatatacttgtacatttaaatcactaagcttcatgatatttatcctccgtgtaatatcttcttgctccttttttgagaaaacgtttgcgcaaattaccaaaaattataaacccaccatttgggcttttttgtatttttatgcaaccgttttcattaattacaattttattgtataatcaagttgtgcaaatgtaaaggatgttttgaagaaatataaatatttcgaaaaggaaaaactaataatgtcagtaaattcaattaaggatattgctagattaagtggatattcaatctctacagtatcacgcgttttaaacaatacaggcagaatatcccttaaaactagagaaaaaattttaaagatcgctaaagaaaataactattcacaaaatattattgcaaaagggatgcgtaaagggagtttagcaataattggtatcttagtgccagatataactaacccatattatgcatcgatagtaaaaaagtgtgagcaaaatttctttaaagaagattatctcacaatagtctgcaatacagaaagaaatgctaaattagaagagaaatatatatcacgactgggaaatcatatggtagatggtcttgtcattgtctccacacaacgcaaaatagatcaaaaacagtctgctattcctactgtcttcattgaccgttcacctaaattaacacaaaataccattatagcttcttctgataactattccggtgcagttttggcaaccaatcatttaatagatatagattgctaccctattctcattactaataaaaataatgatttctcaagtaataaaagtcgtataaaaggatttttagacaccgctaaaagtagaggcattactgatcctataattattaatactgaaacaaactctgatgaaatttacttaaagaaggatcaattaaaagaaaaaatagataacttacttaaaaaacataaaaaaatcggcatatttgcaattaatgataatgttgctagctatatgtaccagttagcaattgataataatatttctgtaccttcaaagctaagtattgtaggtttcgatgattcacctatagctaagaaattacaacttactacaatcagacaagatacttctaaaattgcacgagtatcttgcaccaatcttttaaagctattacgccacaaggaaatcttagatcataaatttacaattggagtttcattaattaaaagagctacgacttagtatcaatgtatctatcaatcaaaaaacgatcttcaaataccctcggctatttgaagatcgcaattgcatcagtccacaaactgatacgtacaatgtttgctcttatcaaacacgatcaatgtatgattacaacgtagccacacataacccaaaaactttagttgaaatcaaatgatcaacttcagtataacaacctatgaaaaaactacaagtattcataggtttatttgtggtacttttttgcacacttatgatagacagaaaattctatttaaaacatgggatacgtacgttggtcgctatgtcacagaaacacacaagatgttaaaaaacgcaataattatcaactaaattggaatcagacgaacgatgaaagtgattgtgctttatttaattatcacaatgtagaaaataattgtgtcaagagtttagcaggctttcaacaacgactagaaatagttactttataattataatgtatcgttcaaaaattcaactagcattacatgtatttaactttctttcttcttattactaaacttagaatcatcatcttcatcatccaaatggaatggaactacagtgtctttatttttctcaatcggtttaccttgtctcttaatttccagatcaaattcattagctaatttacctctttttattttttcacattcttgtttattttttaaattatgtaacttattatcggaatgtcttctcgctacatcttgcgcccactctactaatccctccttttttaaattatctttacctacaatagcatttagaagcatctttataattgctacggctccaccacttactgcagttggcccaataataactttagttatacttattaaatcggaaaaattacttgtcaaaaaagtcaggtaaccaggcgaatttacatccgcttttaaatcaatatttttttgcttttcttcaggcaaaactgagactaatctataccagtcatacatgcttaaatttccgccatgacttgtatatactcgcagataatatttatgattatagttataaatgggtgacaccaaattaaataatttactcttgtcctgaattgacaattttgcagtagcttgatgtgcattcattatccatgccaattctttaggaagatcctgtctacttataacagaaatccaatgaatttttcgtctttttctgtaatcagaacagggatacacaatatcttcattttgcatttgctttattcttttttgaactacatctgcattttcatcataaggtttacccactatcacacccagagcaaatttatatgatttttttgctggagttaaaaccaaatctcctatcttcattccaaaagcaaataaatatgtctgttttgcatgaacagttaattgtcttctagaatttaccggtaagttatcaatagaaatttgattttctttagcatattgatcaaacataagatctttaattgcatcgacagatataatattttcattagctaatttatttaattcatcaacagttatacgattatatctaatgccgatgtaatcattatttacaaaatcatcgtaatactttccaccatctgctctaattagccaaaaatctatcttatcattaaacttaaatacaatatcatctgagtcattcatagtcatcattaaacctgtctttataaaattattatattattaattatataacaacagacagatttaaaaaaagcttgattaaacatatgtcaccaaggtacaacaaccacacataactactccttatctatcccaccgaatcattagtattttaagctcaaccaagttcctctctttgactattatcattcctatttttgatttagtatctcccccaaaaaagggatagacttttttcttcaacattaatcatttgttagcaaacatgatcaattggtgtgtcctctaagtgaaatatactaacggaccaatttgccaaataaatttttaattcattcctattatcgacctcaatcccagtttatttttaatcaaaataagagatgaaccacaacatagtcatgttacagttcatcccctacttcaaattatttaataaaggccttattttctagtcataaaagtagcatacttagaaacgtcttctttcatttgaatgttatatgtcggtgaagtgtacataatagtgtaatcactacctggcaagaattcttattacatctcgcttacttagcctttcaacagctatatttaacactggagttaacagaattaatacaatataactagtgataaaccaatattcatcaaaaatcactagaaaaactgaaactgtcaaatcttttgtgtaaatagttctttctcgtaaattgattttttaattatttatttaatcaaagtaggattctaaggtgtcctgaacctgaccaaagcctttatgaattcgattgaaataacggtcattgtagctcattgcctgaataccaataaaagcatcaagcgactgttcagttggaaattctgctttaggcttagctttacgcttgatgacgttgttaaaggattcaatcatgttggttgaataaattgaagctctgatttgtttgggataattgtagaagaccagcagatcgggctcaattccttcaagcctctgaacttcatgttttgaagcatctccgtccaattctcgacgtttgcgctgggagcaatgcggtaatcgatgacttccttgtggccattaggtttaatgccaatggcaatatagactgcttcacgctcaaacgtttctcggcgcaaaggaaggtatgtcgcatccaaatagacacagaaaaacttgtcgcttagcttgcgcttgtgataagcctcaacctttggaatcatctgcttggaaatatttgatacctgagctggactgtaatggctgccatacatcttttcaattagatcggctattttcctggtggtcacgcccttggagtaaagcttgataatcatgctttccaagacatccgagtgctgcttgtagtcaggcagcgtgtgctgatgaaattgaccgttgcgatcccggggcacttgcacttcaattgggccaaattgcgtatcaactttgcgaaaataagcaccatttctagagttgccagtattccagccatttctggcatagggatcatagcccagaaaggcagtcaattcagtttctagcaagttattaacagcctgttgtagctctttgcgcaataaatcatttattttgtctggattgaatagagcttgagcaaaatctttggtaaaatcattcatgaaggagttcttctttctgtatgtgtttttttgttcaaaccaatcatacgagaaaggaactcctttttctaatgtttaaagaaataaatttaaggaatcattcatccttacacaaactattttacagtctcaaaataaagcctatctctagtttaacttagaaataagctttattagctaaattttataataatattttattcttttaaagaaagaggggaaattatttactattcaactttagtaattctatttacaaaatcattgtaatttttgctattaattaaatctgccactcgtttatcatcaataactatagtagaaagatcatcaaaaacttttctaaattcatcatcatcttttgaactataagctaagacaaagactaaatatattttttgtcctaaccaatctactcccttgggattaatataaataaaccattgactaaatttagaatcataatcaattgcatgaggaattgcaactaatccaaatgctgtactagatattttttctctttcaagcaatttattttcaaaatctttaccaactattcctgatttactcatcttagtagaaagttctgcaattactgctttgtaattcttatgtttattgtctatatagaaattattctctgaggtaaattgttttaatcctatccttagcctttgagatcttagaactaatttaatttctctaattactttctgtagtttggtaacatcattagataggaaaaaactagaaacataaacagtattaaattgtggaaattgttgattcgaatctactacaataattaactgcgtttgtcttaaaatttcatttacatctgataccgtatcaagaagaagcaaatcattaccaaaagaagaatttatttgactaactaatctttgaacatttccatggtaatcactcataaataactgacaaattattttattttctttttgaatttgttcagctactgaattgcccacatgtaatgcaataaaggctatttcttcttcattaatttctattccatacgcctcattaattgcatatgctattaaacaggcacattcataaatcgttggagatgattgtttaatattattcatcagcggattatgaatagaagaactacttttatacctttcaattaacctgattaaatgtggtaaaaatctcttcttaaacagtttttcatcaagatttagattataagttctacgaacaaaaccgacaatttttctaaatagatcttcaattttatcatcatcttttaattctattttttgattagataataataggaacatttcttccaattgccgaacatcactatttgaaagaactactttttgcttattttttatccaattaactatatcatttactatctctaaattgcttgtggtaattgataaattgtcattacctcgatcaatcataataatagtgtgcagtaacaaattattgaaatcgaagtcatcaatcttaaaattatttttttcaagatatttattgagtgcctttttaacggatctaacatcaattgttttaaaattattttgaataattttttcggttaaaagtgttcctttcaattctcgatagattaaagcagataataatttacgtttattcctttctgtacctattacttcataattatcgcccatacgattcaaagtaagactaaaatcacttaactctacttctaaattttgaatttcttttcttaactctacttcattaatatatagtgtttctgataaatcataaatattaacagaactgtctgcttgaagtaagtgacgcagtagccagactttcctttgagaatacgtttgtggcaaaataatagtgctgttttgttcaaaagaagctttatcaccttcatatctgtatccttgtgaactactttttattttaataccagcctcacgaagacttttaattttatttttaattgtgcgctcagttacacctaattgcattgatagcatttttgcagtcatccaggaagaactattttttcgtaggataattaataggtcattattattccgcatcgttagatctcccttctacatattattcaagattagaatgcatttctcttaacttatgagcatttatatagcctttctttaacattcgcaaaatcaaagtatcaaacaacagcaaagaatactgttcatacaaagatcccatcggttgaatagatccagtataactatcttttgattgtgcattaattattatcatcttatcgctcttcttagctaaaggcgaattttcatttgtagtaaaggtaataattaatgctcctaattttttagctgtttcagcttgtgaatttaataaagttgatgtcccactggctgaattaaaaatcaaaacatcatttttcgaaatagctggcgcagtaagttcagaacttaaatgagtatctaagccaatttgtgttaaccgattagctaagcccgcaatcatcagaccacttctaccttcaccggataaaaataatgttttagcatttaaaattatttgaataatttcatccatcttattaacagtaagtgagcatgatgtatgttgcaattcattactaatagctttaaattcacttaacacatctaactaacctccttatttaatctttcaccaacgtcaccagaaggatgattggctaaaaagttcttcttattaaaatttttctttttcattaaaatgcaagctacaacatcaaataatgaaatgacagctaatgagctggttgttgctaacatattaaattcatctatttcttgatcaacttttactttgacaatcatattagctgctttagctaatactgattgaggactttcggtaatcgttataatgtatgcatttttctttttaatattttcaataaaacttgttaattccttagttgatccaccttttgaaatgaaaattactaaatcttgcgaatcaacaacacctaagctaccatgtactgcatcagatggatttaaataaaatgatctaacaccaattacatttaaagtatgagttgcctttttagcatccattgcagaagttccacaaccagttaacaaaatgttgcctttacaattttttattttttcaactagttttaaaacatcgttattagaaatagtatttgctaatttaataatctcttgtccttcttgtcgaaacaagtctatgaaattatcatcactcattatttatcacctataatagtaatagaaatatgacgttctcgctttcttgtttgatcaaaatcagcgaagaaaatctgacctaccgagcctactaaaagttcagcatcttttattcctaatgaaacatttgagcctaataaatctgctcttaaatgaccatcagtatttaacattgtccatttaacagctggataattagggtctgtttttttcattccatatgcaatatgttctggaccaggacttagatatgggtagttttccgtagtttgtctgggaataatcttttgcaaaatatgattcaaatctacttgtaaataatcatcgccataatagttcttatcatgcatgtactcatcaaaataaattgaacaagtagtatgtgtggtttgaactagacaaattccatttcttatcccactatctttaacagcctttttaacatcattagtgatcatatgatatgaaggacgtccttcaaccgtttcaacagttaattctttaaagaaagtactcattcttctatttccttctttacttcattccaaacttcatctgcacccatgccagtcaataaagcaacaccgttaataactctatctttaatctcatcaggaacaatggttgtactgataacaatgtcataatcattatttttaatattgtcgacttcttctgtaacggcagattgtttaatttctacttgatcttgcaaattattctcctcaagccaattatttactttagcgtgaacaatagttgaagtagcatgacctgcaccacacataattaacatctttttcataattacttaccttcttcttgatttaaattatatttcttaacaacattgagatagaacaataatcctaaaagaacaacaattaaaataatcaaacctacaacgcctaaattttgtgacatccaaatccaaattgcatttgtccataagccagctaattcaaatgaaaattgaccttttgttgcaatactgtagttagccaatttgaatgtcttcataattaatggactcatccaagtagctaaataaagcattggaatagaataaatcgtagcaccgattaaacttctaacaatatttcctttaaatgcaccaactaataaagtaaatacataaacataaagagttaagtcacctaatggtaatactttgtttcctggaagaataacagccaggaataatgaaataggaatcattaaaacactagtagcaataacagcgggatgtcctacagttaaagctgcatccataccaacattaactttcttaccatgtaagtgtttctcagtaaatttctgagttgctgaagaaattggtgtcaaactttccataaacatggaaatcatttttggcataatcttcaaaacagcagccatttctgcaccaaattgcaacgtctttgaaacatcaaatccagctaacaatccaatacctacaccgacaattaacccaataactaatggatcacccaagataccaaaacgtttttggatcttttccggactagcatctaacttattaaaacctggaatcttatcaaataaccaatttaaaggaacagctaaaaaagtagcagataatgccatcatgtgagtaactgcaataccaggtaatttaaagaatttaccagtaataggttgcatcaagtcagccataaataattcaagtaagaaaccacctgcaatcgctataattgcgtaaatataattattagtaactgcccaaactaacaaaccaataaatgttggttgccataaattccaaatatccacattaagcgttcttgtcattccaagccaaattagtactaaattaattgcaatagttaacggaatagccaaagctcctaaggacgatgaaaaggctaaaggtccaccaacaccacaaccaacatccataatacttaacgacatatggtatcgtgcaaccatcaatttgattgcaggctgtagatctgcggccatcatattaacaaccatgtttaatccaacgatcaaacccaaaacaattatgataattgggatacctacagttgatcctaaccccaaaaaccaatgtagagcttgtgcaaacatttttatttctcctaacttaatttaattgataatgttttaaaatcttttcaacagtattttcattatttgcatgaatcaaatcttctactgcctgggaatgttggcacatattcatcaaattactcaataaattagcctgttcatgaggctgactcatagcaatcataaacactaaatttacctctacttctttagttgcatctaccatattcttaaagacgactggcttttttaaagaagcaacagcaatttgtgatttattaacataaattgaatctgtatgcggaatggcaattcctaagctattttctactggcaatccagtaggaaactttttttcacgcagcaaaacatgattagtaaaacttttcttcactatattcttttgagttaaaattttcgctaattgagtaattacatccgtatcacttttagcatccatacctaactcgataattctctcatcgaaaaacaccttagctcctcctttccttacgtttttatagtaagcgctatcatccgataataaaaaatctatttttcaccccggggtgaaaaatagattttgcttcattcaattttacctaataatattatcacgaatagctaaggaaaggagactattaataatggttaaaatagcaacatcattacacagtggccctaaattacacatgagtgaaattttagatcaattaaaaaaggcagatgttgatttactacatattgatgttatggatagcatatttgttcctgaaatagatttttgttctaattttactaaagaaattagtcaatatactgatattccacttgatattcatatgatggtaaataatcctagtcgcttaataaacgaatatgctttatctacaacaactgatattggcattcattatgaagccacacaacaattacaccgtgatttattccaaattaaacagcttaataaaaaagctgaggtaattataaatcctggaacaccaataaattcgctatctgccgttttaaattttgttgatcaaattatggtaatgtctgttgatccaggatgcagtggtaaatcaccattcattccagaagtggcaagtaaaattaaaaagttaaatcaattaagaaaagaaaagaattatcattatctaattgaagctgacggtggaataactgacaagaatctaaaagtactagttgataatggcttagatatagctgtatcaggttcttttatttttaacggggatattagacaacaagttcaaaaattaaaagaaataaaataatagaaatatataaatattcattcaagaaactatctactaaagcctgttaataacttacataagctattaacagattttttattgcattaaattcgagctgaatatatcattttcagctccatttcttgattatacgatctctgagatccacacccttaatctagtttaattgaaaataaacatttatgggcccgtttgacagtcgaattcaatattccattctgttgtcgacctcaacctcaatctaagtataagaaaaaaggtagataaaaacatcgtcatgtttctatctacctttatattttagggtgtttgacaatgagccactcttctttgattataaaatttctcacttcattacttatattttataaatttatttttaatccccttcattatagaaattatggtcgcattatttaaaaatattaaaatggcaccataaattacaacggaaaggattatagaaaataaagttttgaggaaaaaactttcccatccaatatcacacaaccaacaaattaaaacaattccactacaacccaaaagtgatgataataaattatttctaaaatttcctgatttaataattttagaaattatatctctcgaaaaataaagattagatatcatcatgctagcttcagctgcaactgtagataatgctgcagctttttcactccaaaatggaatcaaaataaggtttaaacaaatatttataattgcactaataactgtaccaataagtacaaatttttcacgtttgattggtattaaaacacaatcagacattacccagctaaataaagaaaatattagagcgaaacataaaatttgtaaagatggagttgctgccaaaaaagagcgacctgagataattaaaacaacttccttacttaacataaacaagccagtcattgcaggtaaagtaaacaaaagtagcatatttattacttttgttagtattttattatattcattcattcttctttttcccattagcattgccaatctaggaacggtaactattaataaagaagctaataaatttttaataatagaatatacttttgcagctacactatataatccaactacatatgtatttttcataattcctaatatagttatatccgaatttacaaataccataatagcaacattagaagcaaaaataataaaaataggtaataaatgatgtttccacgggatatcccatgttaattttacttttacaaacatccgtgcatgtacaaaattaaagatatttgaacctacgcttgaaaaaactgttattatagcataattaagataatcattcttacttcttacaaaaataaatagcaatattagggaaattatttgaaaagaaatgctacgaacagttatatacgcataatcttcatagattgaatatacccaatccattccaagtgtagtaaaaaatatttgaacagaaaaaatcaaaatacatgacacataatcatgcaaattagtaaaaattattaaacaggcaaaaagtaagatataagaaacaagagtggaacaaatatttattgtaaaaatttcactagcaaattcatttatttgctttttatcatctctatattttgcaccttctcgaatcgcataagtactaatccccaatgcagcgattaataagaaataactaacaattgaatttgaataattataaacacctatcccctttactccaagtactcttgatacataaggaaaagtaattaatggaaacagtaagtttaaggtgctttttaatccatttaaaaaagcattcagccccaatgatttatttttcattttgcttaaactttctacttaaaactcctacataccctataaatttaaaaataggataacaatattttaatgagaaaatttctattttatatctattatttaaagctgcataatccttatatctctttatataggaatatagttttttttctttttttatatctcttaaatttagtctatgaaaataagaaacaatactaactattgtttcttgatgaaacttatgtgctaaatcaggatattcatgctcaaaaaaatcttccatttcataatgagaatgtgctgaagcccccaaatttttcacggaaacagtatgaattaaacttccttttctctgtctataaaaatataaggaactagatgtcataaagaatatattagctttattatataatttataaacgattgccatatcttcagtgaagtctcttgtaggtagaaacaaagtattagaaaatagactttttttaaagattttattccaagaaaaagaagcatatttaggattaatcaatgttttcattgcatcataacgattaattttttcttttacgagagtatcattttgatatatatttgttacctttttttgaaacatagtaagttgaaatagaaaaacatctaaatctgtattaatcaaaaactgtactaatctctccaaaatatttgtcttaattaaatcatcactatcaataaaccatatccattttcctctacttttttttaatccaaaatttcgagtagccgaaacgccactattttctttatcataacaaattatatgagaatatttttcactatatttctttataattttcaaagaggaatccgttgagccatcatttattaccaaaacttcaacttggcttaaatcacttgaaataatacttttcaaacaatcttcaagataatcttgtacattataaacaggaataataatacttaaaattggagactgtaaaatagtttgtgtaaggatgaatgattccttaaatttatttctttaaacattagaaaaaggagttcctttctcgtatgattggtttgaacaaaaaaacacatacagaaagaagaactccttcatgaatgattttaccaaagattttgctcaagctctattcaatccagacaaaataaatgatttattgcgcaaagagctacaacaggctgttaataacttgttagaagctgaattgactgcctttctgggctatgatccctatgccagaaatggctggaatactggcaactctagaaatggtgcttatttccgcaaagttgatacgcaatttggcccaattgaagtgcaagtgccccgggatcgcaacggtcaatttcatcagcacacgctgcctgactacaagcagcactcggatatcttggaaagcatgattatcaagctttactccaagggcgtgaccaccagggaaatagccgatctaattgaaaagatgtatggcagccattacagtccagctcaggtatcaaatatttccaagcagatgattccaaaggttgaggcttaccacaaacgcaagctaagcgacaagtttttctgcgtctatttggatgcgacataccttcctttgcgccgagaaacatttgagcgtgaagcagtctatattgccattggcatcaagcctaatgggcacaaggaggtcattgactactgcattgcacctagcgagaacattgaagtctggacagatatgcttcaaaacatgaaatcccgaggcttaaagcaagttgagctttttctttctgatggtgttgttggcatgaaaacagccttggccaggacttatcctaaagctcattttcaacgctgtttggttcatgtcatgcgcaatatctgcgctaaagtacgcgtcgacgatcgtgaaaagatcatgaacgaattcaaacaggtgcatcaacagacaaacaaagaagaagccacagctgtcctgcatgacttctataccaaatggggcaaggtttacagccatgttatcagaagcttgaaagacatagaaccagatctgctggtcttttataactatcccaagcagatcagagcttcaatttattcgactaacatgattgaatcatttaacaatgtgatcaagcgcaaagctaagcctaaggcagagtttccaactgaacagtcgcttgatgcttttattggcattcaggcaatgagctacaatgaccgttatttcaatcgaattcataaaggctttggtcaggttcaggacaccttagaatcctactttgattaaataaataattaaaaaatcaatttacgagaaagatctatttacacaaaagatttgacagtttctaaaattggcttcttcataatattatgattacctttcttaacatttgttagctttttacattaactgtaacttaacacaatacgaaagacctttgatttaaaatcattctcccaatattgaattattataatttgctactgccatacttataaaaacaatagacatttctaaatatccatctattccacttgccataagaaactgtaaaaatagtatactcattaacaaataagcataaaatgattctctagctaagcgataataacatattaccactattataattcctaaaattcctaattccattagaattttaattaaatctaattccaatgttgttccattgaaaaagaagttattctgtaaaaatttagtagtagaagttaatccactagacaaataattattttgaattaaataccacactctataagctctactcatagaaaaatctactatatcaaaatgaaatctatctatttcccaattataatttaatggatttaataaaaacatatacaattctattaataaaatccacattaaagaactaatatataaaatccattttttgatttttacctttctaaagaaatttgtcgatgctattaacagtattaatactcctaaaatatagacacgtttaaagattaaaaataccattatcatagatgctatggtccagcctggaaatttatctctataataaatgaaaaaagaagctaaagtaaaagacaaaaatgatattttagaattttcaaacggagaatatgaatttgaaaaagaaattgaaaatatatcttttaatgttatggtggaaaaatctgtactaataaaaaaagcaactatagataatagtaatccaaatttcataaacatttcaatatcatgcatagataaaaaatttataaatataaaagcgtacaaaaaaggtacaaaaagtcttattgcttcacctggaaaaaaattaaaattagcatctacttgatatgctttaacatttgaaatgactataaaactaataaataaaaatattcccgttttcaactctgaagtatatttcattttatttttattgaataaacattgacataacggaataattcctacagcaattggaagcagcataaaaatgtaaacaatcaatgtattagcatcacttattacattaatataatctaagaaatttccgattaaagtaataaaaaaagatgtgagtaacaggattcttgttttaagatcaactttcatttcttcatatcctctatcattcagtctgttcatcacagtattcaacaaattcttcgtaagaagaaaactgataatttttatacagtaattgtttacttaactcataattatccattaacttcatctgcgctttaaattttgtattcaagtgtgtaggtttaaataaaaagaaatattcgtttaatttttcttcaggagggacttttccaaatctctttttatattctcttacaaaagtagcagcttccttaagttgattgcattttctcttgttgtaatattcatcaagtgtcattaattttctagctggatttccagcataaacagaatctgaatctacttttccagaaactacactattagcacctataatgacgttatttccaatatctgttccccctaatatagttgctccccagccaataaatacattatttccgattacagttttacgttgacttccgtaaatatatccatactttcttttgatcacgctccaactataatcgtgattaagaatagttgcaggtcctgttatttgaacgtaatctcctatcgatagtaaatgcggtgcttgtacatcaatagtagtattaaatggtctataaatttttacgcctttacctataaacacacctatttttctcaaatgtgctatataactatcactagtagccctataccctaatactttgactttaatccaatttttcacattcatttttctagtcctaatttaaagattaatagtaatattaaagccattcgtttttgtatcaatttcaaaaaaatacgttgttttttatccagtttatcaataggataactttgaatagcttcttttaacatcgagtttttgcaaatttttcttatagtatttaaacctttataaaatccattatttttttcttgtgatatgctcgatcttacattaataaaaaactgctttttcagcctattaatcgaatcttcggataaattattttgttttacttttttaagcaaatacgaatacaaaacaacatataattcaaatttattaggccaatatttatgtgacagtgagtctggattaaacctataataatactcagcagaagaaactatttttaccgattcggaatattgaaagtaatctaagtcccatacaatatcttcagatatatactttctttcagaaacgaaatgcaacttgtttcttttaattaattctagagaatataaattattccacacggacattttgatactatcatttttcttaggtgaatttcccaacattttttccataacattttcttttacttctttgccaaagaaagagttaggtttataatttttcctcaaacttatttttccagtatcatcgattcgagtataaccgccaatcacagtatcatattttccttgaattaagggtgcaatcaatttttttaaacacataggacctaaaaaatcgtcactatctacgaacataacatattctccacttgcatgttccataccataatttctcgttaatcctaatccactattatttttatgaaacacacggatataactatacttttcagaatatttatcacatataattccactgttatctgtagagccatcatcaatcagtataacctcaaaatttttatatttttgattaacaattgaatcaatacattgctctaaaaacttttcaacattatatactggtacaattattgatataaaaggagtcttttctttcatttttacgatattattcataatctacaagctatttattaaatgatttatatctatatatttattttttccaaatggttcataagatgctcttatgaatttatggtttttgggagcctttatttttattacatttggaaaatgaccaaatttatcgttaactgtaaaacaaattttatttctcatgggtaaatttacaaagttcctaatatcttcttctgtacagccattttgatcattgaatttatataatatatgatcccactttattctttttattcttctattccatttttctaaaacttgctttttagaagaataatgcataaagaaaatttctatatcgtccaatcttgcaaccggatatgtaccataaccaggggttaactttagtttctcataatagttagattccttaggatcaataaattttaaaggctgatttaaatattgttggagattagaaataaacttaatataatcagatgcccacaaaaataaaccgaccgtaggagattgcttaattaaattataactttcataaacttctcctccccaacaattattagatataattgtaaacttttgcttatttatttgagactgtaaaatagtttgtgtaaggatgaatgattccttaaatttatttctttaaacattagaaaaaggagttcctttctcgtatgattggtttgaacaaaaaaacacatacagaaagaagaactccttcatgaatgattttaccaaagattttgctcaagctctattcaatccagacaaaataaatgatttattgcgcaaagagctacaacaggctgttaataacttgttagaagctgaattgaccgcctttctgggctatgatccctatgccagaaatggctggaatactggcaactctagaaatggtgcttatttccgcaaagttgatacgcaatttggcccaattgaagtgcaagtgcctcgggatcgcaacggtcaatttcatcagcacacgctgcctgactacaagcagcactcggatatcttggaaagcatgattatcaagctttactccaagggcgtgaccaccagggacatagccgatctaattgaaaagatgtatggcagccattacagtccagctcaggtatcaaatatttccaagcagatgattccaaaggttgaggcttaccacaaacgcaagctaagcgacaagtttttctgcgtctatttggatgcgacataccttcctttgcgccgagaaacatttgagcgtgaagcagtctatattgccattggcatcaagcctaatgggcacaaggaggtcattgactactgcattgcacctagcgagaacattgaagtctggacagatatgcttcaaaacatgaaatcccgaggcttaaagcaagttgagctttttctttctgatggtgttgttggcatgaaaacagccttggccaggacttatcctaaagctcattttcaacgctgtttggttcatgtcatgcgcaatatctgcgctaaagtacgcgtcgacgatcgtgaaaagatcatgaacgaattcaaacaggtgcatcaacagacaaacaaagaagaagccacagctgtcctgcatgacttctataccaaatggggcaaggtttacagccatgttatcagaagcttgaaagacatagaaccagatctgctggtcttttataactatcccaagcagatcagagcttcaatttattcgactaacatgattgaatcatttaacaatgtgatcaagcgcaaagctaagcctaaggcagagtttccaactgaacagtcgcttgatgcttttattggcattcaggcaatgagctacaatgaccgttatttcaatcgaattcataaaggctttggtcaggttcaggacaccttagaatcctactttgattaaataaataattaaaaaatcaatttacgagaaagatctatttacacaaaagatttgacagtttcatttatttttttttgacgatacttcgcaaaaaactttcttcgaaattctaaaacttttaatcgtattccttctattgtcataacattttcctataaaaatttagtactttacaaacattcttataattatcgtatcctctattcttaagaatacttgaatatttcaaagaacactcatatctgtctaataccgtaacttcttttatagcatttacccatgcatctatgttagttaaatcaacatatatattattttcacatagatcggtttcaacagataccctatccgaaacaatattttttaaacctgatgcagaagactctattaacacaaaaggttgcccttcaaatcttgacggtaaaaggaaaagatccattgcagataaataatctgatacattagtaacatttccagtgaatattattctatctttcaaattatatttgtctacttctgcctttatattccctaaatcatcaccttcacctataaatattaatttataatcattaggcaatctttttaacacatgaactaagaaaatctgatttttttgataattaaaataccctacatgtcctaataatttttgattagattttatacccaatttttctctaatttttttacgctgttcaagagaatacttatatttatctagatcaatcccattccttataactgtaaatttttttcttttaaataaccattgccccgccgcatcgttacatgctaatcttccattaacactgtattcaaatatgggacgtaataatttattaaccaagagatgctcagtagttgtattatgactatgtgctatccttaacttcactcctgctaacttagcggcaagcaattcaatagccattgtggtactatttccatttacatgaaccacatcaaatttttcataagaaagatattttcttaattttataaaatagtttattagattagaacttcttccatttatttcttttaaatgaacaccattattttttaattttttcattaagttactctcaacttcattaggtgtaaggatagtaacatcaaaatttttctttactaactgctttgccacattaatgataaacgttgatatgccattggcttcgagattaacagtattaatcagtaaaattttcattctttcaccaaattgttcacaattttctctactttttcattaaaatttttattattactgctttcaccactatttttttgtcatagcaatttgatcataattatcaacagcttgctttaaatcatcaatattataaacaggaatgatattattcattctttctacaattaatttaacaaaatcaacctgatgattattaacatgctcatgaaacttttcttgtctgggtactactattggtactttgccaaattgcaaagcttcaataaagcttgacggaccaccatgagtaattacaattcgagcatcttttaaattttgctgcatttcatcaaaagacatcattttatgcgcttcacaatgcttgggcttatatgtactaaaaccagtttgcatgacgactttttcttgaattgcgccatctgcaactaaatcatcaactttttttattagtcgattaaatggctgctcatgtgttcctacagttacaaatatcataactaaaaaatgctccctagattaattgccttaggataaattttcttcatttcttcccattgcactatgaatttatcggtaattgggtaaactaatttgcctgttacagtcggtttatcataccgatcaaatacttcaatatagactgttttagcccccatcaatttaccaatataaaaaaacggaaccgctactgcagccccacttgaaataattagatcaggtttttctttatggagtactttaatagctaaaaaagtgttttttaataaattttttagattccggttagtaggataataacatccatacatctttttacccttaagtttgcttcgagcgtcttctttatcaaaagttacccaaaatctagttttattctgccaaaaaggtttcaacatgtataaatgtgtcaagtgaccaccactcgagccaactaaacaaactttcatctagcttttctcctatcaaatctcatctaatttattcatttgatcatcaaaattaatattttcttttaatacattagtttcaatcttatttcttagtctataatttacatacatttcttcaatactactagccaaactatcttcatcaaaattggcaattaacccattccacctatcctttatttgttctctaaacacaactaaatttgaaactatgatcggcttatctaatatccttgcttccaatacagataaaccgtatccctcatgccttgaaaactgaacatataaatcacaattttttatgtatggatatggattatccctacgtcctagtaaaaagaaattattattcaaatttagctttcgtattaagctctccaatttttgtctatctttgccctcacctatagcaaaccacttaaactgtatacctttatcttttaatattcttgcagcttttattgaaacatcatatcccttttgttcagttagtcttccaactgttacaatattaaagacattccttgtaaactcttcaggatagaactctgtagatttttttaaaacattttttacatctattacgttgtaaaaaacgtctgatttttctttatatttaggatacatatcgttaaatgtatcttttatagctttagatacaccaaatattctgtcataattaccaaaatattgttctacatttcttatccacggcatccgctcatcatgaagccaaacagcctttttacgtgccctaacgttcaatgccaaaaaagctgttgtaaatgcaccataaccataaaaatcaattgcaatatcataatatggtagagaaggcatcctactatgctcagctaataaattataaatgggtaaatatttattaagtttgattttttttatgatttttccaggtaaagcatacattgaagctaatgaacgataaaaattattatcaaactttatatactcaattttaatttctttctttaaacgataactatattctgtatcattatctaacaaaaggagagttacatcatatttacttctatccaaatgattcagaaactctataagagcaacttccgatccaccaccgagtgatttagcaactacaagaagttttttcataacttaatacgctccattaggatgaataaccaccccaattgtcttaataatcaacttcaaatcttcccagcagccggaatggttgatatacacaatatctagccaaaccatctcgtcgaagtctgcctcactacggcgtgttacctgccatagaccagtacaacctggcatcacaagcaaacgttgcttatcgtagtcagtgtactcagctacttcacttggcagtggtggacgaggaccaactaatgacatgtcaccaaccaaaacattccaaagttgtggcaattcatcaagactatacttacgaatcgtgtgtccaatcttggtgattctcggatcattcttgatcttgaacattgctccatcaacttcgttttcgtcttctagttgatctagcatttgatccgcattaaccaccattgaacagaactttcacatcttgaacggcttctcatctttaccgattcgttcttgagaataaaatgcaggaccaccatcttcatgtcttatttttattatcaaaaataaaaataacggagatagtaaaatcaaccccaacgcactggctagtatatcgaataatcgcttaatcgtgtgatacactggtcgtccgttaacttttgcaggattaacttgtagtttctccattaccatcatattcctcttaccctctgtttgatttagtctatttgaatacactctcttattaatcttatcacgtttaacgcaacttagaagcaaacttgcatatttgcaccaagcattaaaataaccagaactttttcttctgctttaatgggtgccaatccatctgaactgggtcgccattgatgatacttctagcattatcttgccactgctgagctagatcttgactgaattcttgactcatctttttataagcttcactcaattgatactgccgtcttggcaagtcgtgtgcgtcgctggcaaaggtacatccctgccccgccgcaatcaacttgcgcgacatttcttcaatcttattgccaaaaatccccgtataagaactagcagtaatttgcactagacacccttgttccagcatcccttgcaaaacttctggttccttcaagatgcggctattacgctctgggtgcacaataatcggcgtaatcccgcgctgcatcaccttgaatatcgtgtcctgcgcataagttggcacgtcatcacttggaaattccaatagcatataagttccatcttcatcgcagaacaagatgtcatcattatcaagcgcatcaattaagtcacccgacaagcgaacttcctgccctgggaaaaccgtcaacggcaccttggcctcatctagcttctgttggtagagatcagtcagccagatgatgtcatccttatgattagtgtaacgaccgtttagcgtatgtggcgtacagattgcatgcgtcacgccgtctttgacagctgcgttagctaatctaattgatgttgaccaatcctttgagccatcatcaatgccaggcaagatgtggcagtgaatatcgactaaaaccattattgatcgtcactcttttttctaccgaacaggccctttttcttctcagcgccatatccataaccatagccatacccgtagccgtaaccatagccaccgttttcagctctaatgtcgttcatgacgtagcctagaatccgagccttggcaaattttaacatttgcactgctctagtaatcccagccttttgcgtaacgccttgacgtactactaagactacgccgtcaaggtgactagccaactcttgcgtatcggatacttcaagaacaggagctaagtcaatgataaccatatcataatgtgacttaaccaattcaatgaaggtttccattctgcgtgaaccaatcaattcagctgggtttggtggaatcggaccagaagtcaagattgacaagttatcaattccactttcttcaaccacatcatttaaattgatttcgtcagcttctgaagtaagaacagttgtcaaaccagtattgttcttaacgttgaacgtactgtgcaaagttggacgacgcaagtcaccatcgattaacaaggtcttgcgacctgcttgtgcataggtgatcgctacgttggccgtaacggttgacttaccttcactgatattagctgaagtaaaagctaaggtactaatttcttcatcaactgccataaagttaatgttagtccggatagttctgaattgttcagataccgcactacgaggatcagcaactgtgattaatttggcaccatgcttaattgtatcgtcggtaccacgcttttttctaaataatgccatttacttctcctctcctatactcgacgacttctacgcttagggccattagaattcttattcttttttctaatgacaaatgatgatgacacatggaagtgtgaaacttgacctaagttaactaaacctaagttatcagtcaagaatgcatcatccttaactgtagtgtcggacatttcacgaattaagactactgcgaaacttaaaaccaagccaataacaaagccagccaaggtaaagagtttcacattagttgatgattgattaccatcagttgctggcgcaacgatcgtaacgttgttaatgttcatgatgttaggaatttgatctctgaatgaacgcgctacagcgttagcttcaacctttgccttttcaagtgtatctgcagtagcagaaattgagaagacctgtgattgttgttgagtattaactgaaacgctcttggctaattcgctagtagaaacgctgtaactcttaccgctacgttcaactacttctggttgagcctttcttactaatactcggcgaccctctgcattagtcttgtacttagcaggtttagcctttttaaccactctaactgggttagctaaacgattagaagcatcttgcaaaataacgtgactagtcacgatatccttataggtagtaaccatttgcatgttagcttgttgcgtattgtatgccgcattcgggtcattcttattagccttttggttaaccaagatctgtgcattagaagtatactttggtgaaataataaaattagcgacgccccagccgactaaagccaaaccaacactccagataatcaatgcccagatgtggcgacggcaaatttgtagcaattgagtaagatcaattgtattttcagtttgcttttgctcttgttccatttaccttttcctttaataacgattaacgattcataatatagctggccttattagcagctaccttaacatgtggcaattctagcgctgttctgatcttatcagaaactcgttgacgctcatctttacttaccacttcaatttccattgtgccaaacttaggattctgagtttccttacttacaccctgagcatgatcttgagaaagattgttagtggcttttctataatccatagcaatcttgtacatttgattcatggtcaagtcagtttgcatctcactagaaatggaattcaagaaacttgaattaagcaaagttgaaggtgaaacagacttcttaagcaaggccatgattaccaaacggtcacgctcttgtctaccataatcctgacgagggtcaccatgacgaagttgggcaaatgctaaagcctttttaccattcatgtgataagtctggcctttgacaaagctataacccatattgttgaaagttaatggagaagttacatcaatcccccccaacttggtcaattgccttcttcaaaccacccatattgatcatgatgtagccgtcaattggaacactgtaatatttatcaagtgtcttaatagtttcactaactccacccaatgtataagctgagttgatcttggttacaccatattgtgggtaatctgggaagattgcatttgagtcacgtggaattgaaacaatgcttgtactattagtcttagggttgattgacatcatcatgatggtatcagttctacccttccagtgacgacccatggcaccagtatctgtacccaataacaggatattaattggctttttctcattcagtaaattatcaagagtacgtcctttattactcttggtagtcttagcaacgggagtgtacatgttttgcgtcgtatcacgcaaatttttatagatcatcccgcaaacaaaaagaccgactacaatgatcacgccaataacaatccaaaaaccgcgccagaacttacggtgacgacggtggtgatgatggcgatgacgatgtatcggtttattacttgattctgcgttattttccattttaatcctcttaatcttataatcgttactattatatactcaagaacccattttgaccacccttacatgcggcaaatacttgaggtgatgtgcgttttattgctactgaaataatatattatcggtagatacgtaacatgcaaataaaaaatgcatccctcgaaaaatggaatgcattgctgctagattgagtttaaacggaattatttttcatcttactatcgccttgccttaaattgtactcacactgtaccatatttagtaagacctaaataaccaaaaagtattaagaagtacattaaatagaagttgaatagcatgttaagtattgaagaatcaatcaaagaatttgaaacatattttcagggtaaaccaaatgaagttgaagtagtatcacgaactataaaacaaaaaagtagacggccacataaaccgcctactttatcctaattgttatgatgatcacttgagttagttaaatcatcatttttagttagatcatctatatttccaactactccaccaaatagtgtaaacacacctattccaccaaaaatactaccagccaccgaatgcctttgcatcaccaaaaaagcagaaatacaaatacatagaattgttactattgatactactatcagagatgtccatgcgagccaacctcttcttttttgacgagcaacttctaatctccgtctatgcctactttcttcaacaccattattaattatttccttagcagcattcggatacaatttttggtatccctcaagaatatcaggaagcggaattggtccactatacatctcaagataagccattatttcttttttggtttctttaggcatctcagatttttgaatttgatcaagaatctgttcatctagcgaatctttatctgactttttctttatatcattttctagctttttacttggcttttgatctgccataagatattattccctttcttaagtcgtcccctatcctttgccaatcactggcaatagctttttcctcagcattactattactagaatatatcaacttgtttaataatttgacataaggcatagctacatttttcgataattttttaaacactaattgaatatcggtaaacataattctcacctcattcataatctctttctttattaaaagtatacttaaaatttgactcgtggtaaagattattcttctacatgcaatccacttctttccttattataagcatctgtaatacaataaacttaacagcaaataacgaggtgtttttatgattgataatcaacctaaaaagacaaaagcttatatcgcgggcgtaaacttaaacgaccaaaacttcgactactacatgaccgagctggccaacttgactgaagccaacaacatggaagtagttgggcaaagctttcaaaatgcagaatcaattgtcgccggaacttacttcggtgtcggcaaaatcaatgaaattagaactatggctcaaggcttaaaagcaaaagttttagtccttaatgacgaattgactcccgtacaaattcgcaacttaggaaaattaaccaaaatgcgagttattgaccgcacggaattaattctggaaatttttgccagccgcgctcgaactaaacaagctaaattacaagtgcaactggcacgtttacaatatgaattgccgcgtctacatccctccgagaacaacttggaccagcagcgtggtggtggcttagctaaccgtggtgccggtgaaagtaaactagaattgaaccggcggacaattggcaagcaaatttcggctatcaagaaggaattgaaggctgttgccggccaggaagaaatcaaagcggcacgacgcaaccaaagtcgcatccctaaagtcgctctcgttggctacaccaatgccggtaaatcaaccacaatgaacggactattgcgtgaattttctaaagaaggagcctacaaggaagtcttcgttaaaaacatgctttttgctacgctagatacttccgtgcggcggatcgacttgaaagacaactttagcttcattctgtctgacactgtcggtttcatttctaaactgccccacaacttggttgaatccttcaaggctaccctgcaagaaacacgtgatgctgatttattaatcaacgttgttgacgcctctgacccgaacatggtccaaatgattcggacaacacagaacgttttggatgaaattggcgttaaggaaattccgatgattaccgcctacaacaaggctgataagactgatcgcaattacccacagatcgaaggcgacgacattctttattccgccatcgatccaaaatcgatcaaactactggccaacttgatcaccaagcgcgtttttgccaactataaaaagtttgacttgatcctgccactaagcgcaggcaaggaactggcttacctgcatgatcgcgcccaagttttacgtgaagactaccaagacgatggcgtccacatcgaagcgaacatcgcgcccgacgaccaaggacgctttcgtcaatatttggcctaactcgattaggaaaaaatatgaaaaaacataatctgctgttcctttttgccctcacatttttgttagttcctactaacacgcctgtaatggctgctaaatatagtgctagtgagtcaaaaaaggtgcgcacttttcaaaaaagctatcatcgtttgagccagaagaattacaatcagactacgctctttaccgtgcagccaaattttggtattcctttttcagcaggagtgcttgaccctgattacatcaaaacttcaatggcttatgtcaattattaccgctcattggttggactgcctgatgacgctaactatgctaatgataacgttaacgcacaacttggtgctgcagcgctagcttcagttaacgcggagcaaaatctgcgagctcacggcttacaaggttacgtcaagcctggctatatcagtgatactgactgggacacagcggaaaataccacattgggcaatatcaatttttcagaatcaactagcggaaccacggctggcgagatcgttaccgatctgatacgtgaagataataatattgcaggtaatggcaacatcggtcaccgcggcatgatcctctcgacgcgagccacccgaatgggaattggtgctgcttatggcactgaaaataatgtcttgtattctgttgaacatggactatttgctgatgatattttgcgtcagcctgtgaaaagccgaatcgtttatccagctgccggcgtttttccttacgaattagttggtggtaaaacgccatggtcttactcaacaaccgagcgaatttctggtcagccgaaaatttacatcacggatttgaccaccaagaaaaagcggcaagcgacgcaggtgcgcaacttcggcactgctctttatggtgacggctacacaacgacaatcacttaccgacctggcaaaaccaagttgatcagcacgcacaagtaccgtgtgcaaatcggcaaacattatagctacagtttcaaatttttcaggcaaaatagcacattgaaaaataaacagattgtaaagcatcgaaaatgaaatacgttgatatgcaaaacggctcaagcagttgtacatcctgcttgagccgttttagatagtaacaaatattgtagtctgttcaacaatcttcatgtaaaataatactcaggtctattgcagcggttagctaccgctaagacttagtaattttagcatggctacacacccctcaagatttttaagttacggaggtggaagcatgcataattgggtagactggagaagtaggcttacaaatgattgcttgggctattgcgtatgcgataacaaaaaaagctaatcacaatgattagccgaaacaacagtcatcttaagttacgattggagttagcgaccgacactcgctagctccttttcttttattattttaatatgatttagaatttattgcaatgtttagaagcgcttattctacgccaatgacgtaacgcatgatgaatcaatagcttgttataccaagcataattgtgcttcatataattataggcggttgtaaaattttccagttggctagccgcaatgaattgattgcgtgtccaatgccaatcctgagtaggataatataaaattttcactcggattacccttcctactgtaataattgcccgatcatgatgataacgcgtgcgagcaacattgaggtagctaccaattaaagtattgcgccagtatcgattatgcagataatttttctcccaaagcaaggccctgcgcaataccttagaaatgcagtaccattcgcgtttgccgttaggcaattcaaccaaacaccaaagatattggtgtctcttcgccattcaatccaccccttctaattaatatcggctttaattataccgctactagctattcagttagaaaatcaataatgtcagaaaatattaggtcatgatgtcaaatctattcaactgacatcatttgtcctaagaacgcatttaccgcttgcttaatatactcgctgcaaaggtgagtatactgcgttgaatttctggacatggctctgcttaaacggtcttgatgggtgtcattttaatcccttctttaatttttcagtctagagaaaacttttatcaatacaaaaaagcaagcgcattaatcgcctgcctaaaagtattccaaattacttctctatagcactctcttagcaatcgatggtgtaaagtaactcgataccgtttgcaaaatagtaccttgctccggtgttgctgcgtttacatattgattgtttcctacataaattgcaacgtggtatggagctgtcgttgaaccccagaagactaagtcacctggctgcaagttgttcaatgaaacagtttgaccaaccttaacttgatcataagttgttcttggcaagttaacaccagccgctttttggtaaacatattgtactaagccagaacagtcaaatgaatccggaccttctgcaccccagacataattcttacctatctgttgtttagctagcgcaacaattgaagcggccttactagtagcttgcgttgaagaagtttggttagtattttggctagtcttcttgattgccgtattaacaatttgcttagccttcttcaccttagctatcttttcagccttcttctgagtagccgttttagtagctactgccgctgtcttcttattaacagtagtctttgtctgcttagcttccgttttcttaacagttggtgcttgcgatacttctgctttttctccagcagtaacatctacggtataacgcgcttcaatccattcacgcgttccaaccttgtaccacaagttgcccttcttatcgagtgcagtctcagctacattccagaccgtgccgtccttagcacggtagcccatgaattgaccattctcatagttggtccaaatattcaggctcttacctggtaaatagctaatcttaacttgcttaatcgcagtaaaattagctgcacgaacagttttcattgatgtgattgcggaaacacccgtaacggtcagggctgcagccgctcccactttaaaaaaattatgtttcataattgaatccccttggtagcgaaacaggtgaaaacttttcacctaaaattacccactcttactatgtaacgccttcattattgcatgtcctacctcaagaagcaaattagaacattacaatattacaaaaaagacggatcactggaatccgtcttcattacttactatcttaatttaaaacacgcttagcaacacttgggtagaagtatgaactcaaagtttgcttgattacgccttgacctggtgtagcagcgtggatgtattggttgttaccaacatagatacctacgtgatatggagcacttgcactaccccagaaaagcaaatcacccggttgaagattatccatagaaacggttgatccttgcttaacttgatcataagtagttctacccaacttcacgccagcagcgttagagtaaacatattgtaccaaacctgaacagtcaaaaccgttagttcctgtaccaccccaaacataggacttgcctaattgtgctgaagccaaagtaataactgctgaagcatcaccagttgcttgaactgacttcttagcctttttagctttcttaactgcttgagccttatctgaactagcatcaacagtatattgagctaaaatccattggttatcaccaatttggtaccatgtacggcccttcttatcagtcttggtgtcaaaaacattccaagtagtaccatgttgagcacgttgaccagtaaagtggccaccattgtagttgtcccatatgttaattccataacctgcaatgtagttaatctttactttggtagtagcagcttgaacagtagcattagttgaatctggcttgatgacatttactgcagctacaccggtcagagttaatgcagcagctgcggtaacttttacgaaattgctcttaatattcatcaaattctcctatatgttttcactatatatataagcattcttagaatttattacttaagctggtaacgaaaatattaattcatcgaaaaatctttaaatttctttaacgtatttaacaaaatctataataatgtcctaatgttacagtagtgttacaaaagcaatactgatttaataaatattacgtttccgtcaaaaagaaaaatagctagggagatttccctaactatcttaattagatattttatttttaggaagactaacgcaattagtcgattacacgcttagctgatgatgggtaaaatgaagctaaggtttgttgcttaacattttgaccaggagctggagcgtgaacaaacttgccgttacctacgtagatacctacatggtagttaccccagaataataagtcacccttcttaagcttcttagttgaaactgaaatggtcttaccaagagtaatttgaccgtaagtagttcttggcaaagtcttgttaatagcattcttgaaaacgtaagtagttaagcctgagcagtcaaaaccgctaggaccagcagcaccgtaaatgtaaggcttgccgatttgcttcttaacaagcttaacaaccgcattacgctccttagtagtagctgattccttcttaactgaacttgaatcaggattggtagtttcaagatctgaaattgagttgttagtattgatagtagtgcttgaaacatcatcagcgtgaacagctggaacattgatcattgaaataccggcaaagaatactgataaagctgcggtgtattttactaaagtacgtctaaaattcaaaattaattgtctcctctaaaaattactaaatttgtttttgatttcttaaatcagttgacggtttatataataccgactgaatgttacacgaatgtttcaaaagagctaccatcgcgttaagaaacatgttaaaaaaacagattttatgtaaaaaaaggagaagcaaaatgctagcgaagctttgctacaagggcatcgagcgcgtttttagtttctgttaaattgtcgttaactaagatatgagcgtattgcttcaaatcttcaggtaaagcatttaattcactgccgctaagtctttctttaatcttggctggatcatcgccccgctttaaaagggcgctgttttaactcttctttagtagaagttgtaacataaagaaaataagccttgtcacctagctgtttaatgtaggaataaatgcccttgatatcgacaattaatgaaaccagatcacttttttgccaggccagattcaaagcttctcgacttgagccatattgataagagccgtacttaatatgctcaaaaaagtgcagctgtgcaaaagtttcgtctgtttcaaaatgatatgacacatcttgtttttcgcctgatcgcatcggccgcgtggtatgcgttaatacgcgtggaataccatatttttcagttaaatattctgaaacagtcgtcttgccagcaccactaggtcctgcaataagaattatttttttcaaaacctgattctccccacttgaaaatgttgcttttttataatagcattcttgtgttataaaagactaagactttttctcggaaggaagatacacataatgaaaaaagcagacgtaaaagttggtgcaatcgttggtgccaagtcagaagaagaacttaagaagccattccaaggcaaagttgaaaagatctacgaaaattccgcattgcttgcaattacttcatacgatcccgttgacaccactgctatcagcgacttgaacaataagatcgtagttaacttcaagaatttaaagactgctcgcgctgccaagaacagcaagactgcttcaactaatgaagttaagattgaaaaaattgccaagaagaacgatgataaaaaagaagcagacaagaagtaaaatttgacaaaaatagcccgcgcaatgtttacgcgagctatttttttgcctaaaattaggacatcgatacgagaggaaatattttatgaaagaaaaaacgcgaactgttttattttggtttattttaatccagccctttttagacctttattggttctacaacggtaaattagcggaagttttaccatttactctacctacgattatccgaattttagctgtttttgtgattttctgtatgtttttcagtcaaaagcaaaattggcaaaaattagggcaagacaagtggttaattctatatttagccctactaattttgtattcgattattcacttaatccacgtcaaaaattttaacagcattaatcctaatgactacaattattcaaccgtaagcgaaattttttatctcattagagtgcttttacctctgatggtgatcttttttacaaaagaattgaatttcagtcaggagcaattcagacacgttatcgaaggcatcagcggacttttttcatttacaattgtcattaccaatctttttgtcatttcgcttagaagctacgagacaggcccgattagcgctaatatttttgaatggtttgttaaccccaatatcggttactcccatatggcctccaaaggcttcttcaattttgccaacatggtatcagccgtactctttatgctggtgcctctgatgctttacttcatgttcagtcgttttaactggaaaatcgtcactttgaacgtagttcaagctttagcgatgatcgagttaggaaccaaagtggccctcatcggtttaatcggtggcgtgattatcagtattttgctgtatgttttccacttatttattgttaaggatgttaacaaaaacggcaaagccattatcgtggcgcttttaatcgaagcgggcacctttgccatcatcccctttggtccagcaatccagcgctataattatgaaaaatatttggctcagcaatccgatgattctttgacacaggccaagcgagaattaaatgctggcttaaaaaaatatcctcaaggtaaacagcgcaaagaatttttaacgaatttcatcggcaatcattatcaagattacgccttaaataagaagtttgtttttaaaagctacccttataaatacgatcctgaattttggctcaaaatcatgaacgagccaggcaccgctagaatgcaaaaccgacatgtagaaaaagcaatgctcgatcaagttgtgaagactaacaacaatcggctcgacaagttcctgggcatttcttacacacgagaaaccaacattttcaaccttgaacgtgatttcactagtcaaatttattcacttggttggatcggcatgctgttgttcattgggccttatgtcattatcctgctctacgctttaattaagtggctaatgaacaaagaaaagcggacttatttgatcagctcaatgttgctttcaatcgcctttatgattttcgcagcattctcgtcaggtaacgtaatggacttcttaacagctagcttcatcctggctttcgttgaaggcagcttgttagctagcgtaaccagaaaagaaaattaaacataaaaaaaagttaggtagttgcttgcctaactttttcttagtttttaaacattatttttcttgcttaataaagcttgaatctggcacccgaattaagtagtaccgagttgctaaatgacctgcatgcatcccgattccattttgccaattccgcttgtacttagccgtataaattgccacgtaagcacgttgatactttttatccattttagccaattccttttttacataaggaatcttctcggcattcacatcaagcgcagtgttaccataagcaatcgaggcataatcactaccaatcgtgaccttgctgccatcgcgataaaaagtataagtttgtgagccatatctctttttagcagaattaattgttacatagcttgaatttcccgcacctgtacgcattatcagtggctcatacttcacgcttgaagtaatgcggtttgcatcttccaggtctggattgtccataaaagtctgattaaacatccaacctgcagctaataaaagtactacaatttccacaatattaagagccatattcggccaactaaagcgtttatgctgtttgataatcatcttaatccgtctttgacggatgttctggacgatgaaaactaaataaagaatgatggcaacccaaatcaggatcccaatgatattccagctgaacatatctcgccctgctatataaaacatagaaacatgcagaagttttcatatttctacatgtcagaaagaaatatattttcctttctttgtcttatttactgctgtcttcatcagtattccgatattccatctggggagtaatcgcattgactaactcttgcagcttaagggcttagccagcccattgtttttattttgttaacgctagtaaatttaatactgcattgtcatcacgatcattgctatagccacattcataacaaatgtattcattatgcttggtgccatgttttttattgccctgcagagtaattttgtctgcaccagttttgacatagccacaattggcacatctttgtgttgatggatatgttttatcagctagaattaattctttgccataccattcacacttgtaagtcaagacttgtctaaacttgccaaatagtgacctttgcatgcctttggaggctacatgggtcatcatcatttgtttgacattcaagtcttcaatgacgatttggtcataattgtttacaagctcagtggtaaatttttgcaaaagatcattctgaatattggctgctttgcgataatcacgctgaagcttggttctcacttgcaggtaattattgctttggcttgccgatttaccgttaactcttctctttttagacaatactctttgataatgcttgattcgcttgtacagtttctgtagttttgctggcaaaacattaatcttgccttcagtgtagttgaaatgcccaacgttgacatcgatggcggtctttttgccagttttagcctttagtccagcctcttcttcataggaaagggcagcgtaataatgtcctctttctctaaagatgctggcaattttaacctcttccatctttaatgcctcgtatgctggaatatcaaaccaagatttaatccctctaggcttatctaatctaagcttgccattaattatcttggcgcgatcagttttaaagccttgacgtggagctttcttagatttgaaatgcggcttgccccaatcaggctgggtcttgtcaaagaagttcttccaagcattagccagatccttgactgctaattgcagacagcgagcagacaaagcaaattgccaatcagccttgttattgactaattcatcccgcactcgatgctcattaggactaggattattatccttgtctaaagtccgagcttcatacatgtcttgccaggttgctaaagctagattccagcagtatctgcgatagttacaaagacgttcaagttctctttgcattatcttatttggccttaattcgactacctgagttttgatcatttgtttcacctccaatgcaaacataagtttagcaaaggatgtaacaaaaacaagcgaacaaaatattaaatttttagcagcagttaatttgcttctatgttttgcctttctgaacaaattacctgtatctttttctatattgccattaaattctatatttcagctaaccatttaatcctcctttttttcaattatatggtaaaaaaagcaaaatttgaataggataataattgaatacttagttaaatagtgagaagatcttactagtacattagatttattagggaacattatggtagcaatagctttttattcaattactgggcaaacggaacgttttattaagaaaactcaactttcggcccatcaaatcgacgatgccaaccctaagtatgatatgggaaaatcttatatcttaatcgtaccctcatatcaggacttcatgatggattcagtcgttgattttttaacgtataaagataacaaaaaaaatattatagggattatcggttgtggcaaccgaaactttaacgacctctttgctcaaactgccaaaaagatcacggcaacattgaaagtgcctattttgtatcttttggaatttagtggtactaaccaagatgtcaaaaatgtacgaaaaatcgtacacgatctttctgctggtgagagtactaagcaagtccaaaagcctaaggaattacgtgggaatatcagctttttgagtgattttagagattaaatatgactgaaaaatattacaaagcaattaactggaatgacatggaggaccgggttgacaaatctgcttggtcccgcctgaatgatattatctgggaaccccgtaatgttccagttagagaagataaaaaagaatttttacaattagacaagccggtgcaagatgccttgcttcacgcattcggagcactatctttttcatctggactccaaatgaaaaatgggctagagcaaattaaggtagatgccatcacaccagaggaagcagctgtgctgaatgccttgcaatatttggaatctattgccaataaaggctacagctacgttatcaacgagttgacggactcaaatatagcaaaagacgttattaactgggctgatgacaatccttacctgcaaaagaagattcggattttgaataaaatctaccaaggcggggatgcactacaaaagaaggtagctaacgttatcctagagacagctctctatcattctgccttctacgctccgctttatttattcggacaaggcaaaatggtacgaacagctgaaattgttaagttagctttacgtggcacttcatttagtgggatttatcctggttacaagttccgcttaggctaccaaaaattaggtaaaactgagcaagcagagctaaaagaatggatcgataacttgtacgatgtgctaattgataatgagaagaagcacattgagttaatgtacaagggcactgactggatcgatgatgttacgcactatctctactacagtgtcaacaaggcctacctcaacctaggtttttcagccaagtatcctgacacttctgattcaatcaaccctattattgaaaaaggggtcatcaagaatgcagtgcttgaagacttcttcttctacactaacgatcactcgctgactaagtttaaagaaattaaataattacaaaagacgcaatcgaaaattcggttgcgtctttttttacttcttagtagttttcttggttgcctttttagtagcggttttcttttctgcttcctttttttcaggcttcttatattcacgtattgtggttagcttttcaataattgcctccaccagttgatcaacaatcttcgctggatcttgttcgatctctacttcactggctaattgatcaattctaaagcctgaaacattaacgtattcagagcgcgtttcaaagtaaacatttaaaggatattccttaccctcttcaaagaagttagcaactcgtttgtaattgctataaggcaaattgataatatttgtctccaaggcaaaagtagccggccgctgacccgtcactgctagttgcgtttggatcaatgaattatgcttaaaagcagcgataacttccttgaccatcttttcagcatacggcttgattttgctcttcgacttgctaatgtcggcatatttaactgtttcaagatcttgaatataatcttgattttcaattttttcgttgagatcttttaaattaatttccaaaataaactttcctttttcattggttataattacaaaatactacaaaaaaattttttgtcatcctttttaaggattcaattcagtatttttagctttttatttgttaaaatgacactatgaaaaagcaaaaatttgatcttaagtatttatttttactcattcccattacgttaattctcattataggattgatttacctttttaacaaaaataaaatcgataatgaaattaattggatgacaatgaaggaagaacagcggctcaatgtcccgctagaaaatcaactgcccgatctacccaacggctgcgaggttactagcctatcaatgttactgaattactatgacattaaggttaacaaatatgatctcgccgataatattgctcatgttgattctttcaccgacaacggtaaatatcgcggcaaccccaatcaaggctttgtcggccatatgtctgtcgctaatgctggctggtgcgtttatcatgggcctttatttgacgttgcacgtaaatataccagccacatagaagatgcctctggcagcaattttttagcgattctcaagttaatctccgatgggcatcccgtgctgatcattaccacaaccacttttaatcatgttaacaatatgcaaacatgggaaaccaatactggtaaagtcaacgttacaccgtcatcacatgcctgcgtgatcacgggatacaacaagcaaaagaagcttgtctatgttaataatccttacggtattaaaaaccaaccggttaattggcataacttagaattgagttatgaccaacaaggacgccaggcactttacatcaaataacaaaaaagggcaagccacgaaggcttgtccttttaactcaaggcacatgctcaaagcatatgtggacgtttaaactgttcacatcagtgcgtccaacatcagcacttcccgtgcttgccacttaaggcggatgtcctctatctcataaatatacgcatctcgcgttcattaatcgactcgtcagtcagtaattgtactattttttatgtttgatgtacagtctagcacttttaaaatgacgatatttaaatttataaaaaacttcagtacacatagtcgataacatgaaacctaaagcaatagcaccagtaacaattgctactcgtagaagcaaattctctccttgactataatcccccacaactaaagcacgtactgcttgataagcaggcacgcccgggactaacggtactaaggcaggaatattaaagaccgtcactggactttttttaatgcgtgcaaaacacaagcccaaaatacctatcaaaaaggcgccaattaaatttgaaatcattcgcccaaatcccaaattaaagcaagtccaatatgccatccagcccactgtgccactgactcctgacaggtgaagatcgcgatgcggtacattaatagttaatgcaaaacccaccgaagctacataagaaaaaatgacattaataataatttctaaccaaagtggcatttttatactcctatgaatttaagtacaagtgcaactccaccgcctaaagctaaagcggttaacacagcctcgcacattcgcataatccctgataataaatctcccatgaatagatctcgcaaagcattagtaattgccaagcctgggactaaagtcatcagagcgccgatcaaaatattatcagtaatcatttgtggattaaaatgattgaataatactgccaagatccccatgaccattgctgcaattagctctgataaaaaacgaatcttagtatattttttaaactcataatacgaccaaaaaccaacagcccctactaaggcagcacctgggaaatcaacccagtcgtaattatccataaacaaaaccatcaaggtagcagacaatacagcagctcccaatacctggagccacattgggaaagtaggtgcttgtgatactaaagcaatcttttcttttaattcagaaagagtgatttttttaactgcaaattggcgcgacaagtcattaacccggtctactaattccaaattgatgttgcgatcacgaatttgtttcatctgacttagcttgccaccatctaagctcatgaaaacacaggttggcgtcgcaaaaacacgcggatcatcaattccggcattgcgagcaattctgagcattgtatcttctacccgatacatttcgctcccgccttcgatcattagtcggcccgcagttaaacaaatatccattacttcttgataaaattggacatcccgcttctcagacatagttttagcctcagttcatagtttcaatatcgatggtcttgtcgacccaatcaccgcggaaaaagtcacgttcgtgactaacaataatgactccgcctgggaagttaacaatcgcttttttcaaagcatccttggtatcgttatccaagtgattagtaggttcatcaaggaaaagcaaattagctggttcaaactgcatcttagctaattttactttttcctgttccccaccagaaagttcctttagtggactcattgcttgttgtgcagttaagcccatgcgtgccagcgcttgtcgcaattcctttggctttttgcgttcaaattcttcttgtaaatattggagtggagtcatgttgctattaggccaggttagatcttgcttgaagtaagccaactttgcagtaacagataactcatatgaaccataaattggctttaattgccctaacaatgtcttaagcaaggtagtcttaccaattccgttaaaaccagtaatcgccactttttcatccccaccaacagagaaattgaaggctgacttgaccaaagcatggtcgtaaccgatgaccaaatcttgcgtctgtagcaacaaattagaagcagtcgcaacatatggaaattcaaagcgtgccttgcggttgttttttggcggtgtcaaaacatccatccgcgccagctgcttttcccgtgacttagcactcttagcacgtgtacccgccttgttcttgcgaatataggcctcagtcttagcaatcttgcgttgctggttagcataagccttcaagtaggtctcacggttggctgctttttgccgcaaggcttgcttcaacgttcctgtataacgagtaattgtgccaaaatcgatatcgataatgcagttagtgattcggcccaaaaagtcataatcatgactaacgacaataaaggctccagcaaaattgttcaaatagtcaaccagccaatcaatatgtgaaacatcaagatagttagtcggttcgtctaaaaccagaacatctgggctttgcaacaacaactttgctaaaattattttagagcgctgaccaccagataacttagaaacatcgtgatcatagcctaaatcagctagtcctagtcctgaggcgacttgttcaatttcagtatcaatatcataaaaattattttcttctaaataagtctgtaccttgccggctttttctaacagggcttcgtccccgttttcggcatatttggcatacagatcattcaactctttttctttttgaaataattgatcaaaagccgtccgcaaaaagccacggatagtcacaccaggtgccaatttagcatactggtccaaataaccaacatcaattttattttgccaagttacttgaccatcatcgggcaaaatttcacccgttaaaatcttgattaacgttgacttgccaacaccattttgaccagtaacccccatatggtcttctttgttaagcacaaaattggcatcttcatataaagttttatcaataaaactctgacttaaatctttaacagttaataaactcatttttcatcccctattatttagctgattcatgttctttttcataattttggagtgcatcaagaacacgaggccaatagcgcttaggtaagatcaattgcaaacgatcatgataaataggaaaatcacttgcttttagccccgtaatcttagctagctcctgatctgtcagcttatatttataaacaatacgcttaatttcgactgatgcatgtcctctaaaataggataggccgaagaaaaagatagcaaaaacacttgctgtaatgattgctaattgcaaattcatcctgaagctgtgtagacaaataaaaatcacggcaataaaagaaatcacagctgagagtacaccgtaaataactggaaatattgattctttttcttccttttgcataatcttttcctccctaattgagacttagtaactttacgaacttagcaaaaattgttaaagtttgcaagatacgacgttttcattattttttacataagttaagtatacttagcaaaaatgaaattgcacgaagaaagaagaaaaatgagccaagaaaagcaaaaatactattttttcccacttcgttttcaacaacaggacttaaagattgaactagttttgcctcaaattacgcaagctgaggcactttatcaagctgttgtccgcgatcgaaagcaattaggtcaatggctagcctgggctgatcaaatgcactcagctaacgatgaagcaaaatttattaagcaaattcaaaccaaaatgtcccagcagactatgctcgtgctcactattttagtcaatggcgaacctagcggcatgatcgacttgcataagctagtgccaaataaaaaagccgagattggctattggcttgctagcaagtatcaaggccgcggcattgttactaagagtgtaacggcgttatgccaatatgcctttagtgaattgaacttgcaatacattgatctgctcgttgccgttggcaatgacaagagcagcaatgtcgcaaagcgttgcggttttaaattaatggggattgagccaaaattaattaatggctatgacggccaaatttttagattaattcgacgttaaaactactttgttagcttgtcattgcgttaaatattaggtagactaataaaacgagtgtttggaatcttaatactttactaccaaaacaaactcaaatataattatgttatacgatgcttagcatcaatgagtggtcggctcatggtcaatctgattctaatgcaggacataagggcctgacgggtcgcagggaccaaaataaacctgatattatatatctaagacataagggcttagctggtggcagacaccaaaattaaaccgacttaagagttcacgagtttgtgaactcttttttattggagaaaaaagagatgaatcgcaacttatttaaaaacgcaaatttaaaagaaatcggacaattacgtcgttatatgtcgattatttatgataatgctgacttttacagcaaacactttgtaaacaaaaccattatctacactactaagaataaaaaaaatcgaacttactgctagaagagataattttatgcatttgtgtggagtaacgtatatcgacggtccaagaaaattttttaatgatgcattagatcaaaaaatacaaatcaaaaaaatacttataaaaaaagatgggtctacctttcaaaaattacaaattatgaatcaatttcaagaaatgcttggaccacatttaagattaacaggacccagtaattttacatatttaaaatttgatcactctatacgtaccaacaaaagcatactagctcttgcactattaaataatcaaaactacatgatacctatctctttattaaatctaaaatttattcatccttttccaaatggagaaaaaataataaaaatagaatctcgagatctaaaaactggtaaaattactattctcaactaaaaccaaccagtcagatctttaataatgaaaaagataattggaactaacaatgatggtaaaaaatttagcgttttaacatcacgaatcttcaataaagctaagccagagcaggcaattaaaaagccaccaacaatggaaatctcagttaccaatggtcccgtaaaaaagctagccgacaaaaatttagctaccaggtaaatactaccctgccagcaaaatagcaccggagcaacaacgagcatcccccaaccgaaactagcgccaaaaaccatcgaggtcacaaaatccaacgtagcattagtaaacagcatcgtatagtcgcctttaactgccgcaattactggccccacaattgatagtgctccaatacaacaaagcaaaatttcagtggccagccctttacctaagtttgatttacctgttttttctactaagcgatcaaaatggccagagatatcccaagccgtgccgcacaaaccaccaagtgctaagctaacaataaataaaacaggatagtgactcttgggcatattattagtaacattctcccagccaatacctaaggctgctaaacccattgcaataaagagtacatcttcaaatcgtttattgattccttttttcaaaaaacagccaatagttgttcctactagtaaggctaacgtatttacaattgttccaatcatccttctcacctcttaagattattttaccgcagaaaaaaagtatccttgtcggatactctttcatttaccagtgaaaatgccaaccgctacttgaactggatgatgaacttgaactagacgagctgcctgtccctgttccttcaccataaccagaattagaaccgctggctggcttatcctgattttgatcataaatctgatagtttgtaaaagcctgcggatcatcccacttaatgtgattgttctgatcattcaactcattctgccgtgtttcctcgttattaagcgtttgggtcgataaattcaaattcttgcgaattctatcagaagtcttttgcaattccttagttgaagcaacttgaattgaggctccatcaatccaggcatcatgaccttgaatatagctactcttcatatttttcatacagccacgataattcaacgccaagcttaacatatcgttgaaggtcaaattagttttcacatacttattaaagacatcaactagcttgcggtaattgctgagcgtattaactgacatggccttgtgggcaattgcctcaattacttgacgctggcgcatctgacgaccatagtcaccacgtggatcttcttttctcatccgcacataagctacagcatgccggccatttaagtgctgtttacccttgtggaaatcacaccagtcatatgaaaagtcaaacggcacattcacatcaacaccgcctaccgcattaaccaagctcttcaatgccttcatatttacttcaagataataattgattggcacattaagcatggacgagaccgtcttcatacttgattcatgtccgccaatttcataagcagagttcacccggaacataaagtatttgtcacctggatcgcctttaatatctgctaaggtgtcacgtggaattgaggtcatcgttgccgagtttttttgcggattagccgtggctaaaatcatggtatccgaattacctcgatcatgccgtccttcaattccttggtcaactcccaacactaaaattgaaattggctgtcgattaacaattttagcggaagtagcagtattaccgccattcttgctatcaatcacactgtggacagtaaagtacatatgtgcggcccaagctacgccaaagcaaacagctaataaagctaccacgcccactagccgagccagaaagttccctggcttcagcgctggcgcgtctgccgcaaatgcacgattacggtgaagattaagcgatgaacgacgagcacgataatcttctcttcgttttggattttggtccattcttttgatcttttcccttcgaaattaatacaagttagtttatttgtatcacttttcgtctctagataaaataaaaataccgataattaataataacttatttttttgcgaaagatagcataacaggctaagatgtatacaaattgaaataattatggaggaaaaatatggcgataccaaacagaaatgaagtcccagaagaacttaagtgggacttgacccgaatttttaaaaatgatgaagaatgggaacaggcctatgcagcggcccaagaaaaaatcgaccaacttggtgaattaaaaggtacattagcaaaatctggcaaagatttgtacgaaggcttaactaagattctggccgttaagcgcgaggtggaaaatatttatgtttatgccaccatgtctagcgatgtggatactgccaattcacattatttaggctatgtcagccgggtgcaaagcttagctaaccaattcgaagccgctactagttttattaacccagaaatcttgagcatccctagtgataaactagctgaatttaagcaagctgagccaagactaaagaattatgctcactacttggaaatgattactaataagcgacctcataccctgccagctgaacaagaaaagttaatcgctgatgctggagatgctttaggcgtttccgaaaatacttttaacgttttaactaactctgacatggaatacggctacgtccaagatgacgatggcaacatggaacaactatctgacggtttgtactcattattaattcaatcgcaaaaccgtgacgtcagaaaaggtgccttcgacactctctatgctacgtacagccaattccagaattcgctggcttcaaccttgtccggcgtagtgaaaaaacacaactataacgctaaagcgcacaaatatgactctgcccgtcaagcagcactggctgaaaacggcgtacctgaagcagtttacgatactttaattcaagaagttgattctcaccttgacctgctccatcgttacgttgccttgcgcaagaaaattttaggcttaaaagatttgcaaatgtgggacatgtacgtgccgctaactgggaagccttctctttcttataactttgaagaagctaaggaagttgctaaaaaggcattgaagcctttgggcgaagactacttgaagcatgttgactatatttttaataatcgtgtcatcgacccaatagaatctaaaaacaaggtaactggtgcctactccggtggtgcttatgataccgatccttatgagttgctcaactgggaagataacatcgattcactttatactttagtccacgaaactggtcactccgttcactcctggtacactcgcaatactcaaccttacgtttacggcgactatccaatctttgtggctgaaattgcttcaactactaatgaaaatattttgaccgaatatttcttagaccacattaccgatcctaagacgcgggcctttatcttaaattactaccttgattcatttaaaggcactttattccgtcaaactcaatttgccgtgtttgaacaattcttgcacgaagccgatgctaatggagaaccactgaccgctgacactttagacgacgtttacggtcaaattaatcagcattattacggcgatagcgttgaaccaggcggcgatattgcccttgaatggtcacgaattccacacttctactacaatttctatgtgtaccaatatgcgactggctttgcggctgcaacagcattagcaaacaaggtggttcatggaacgcctgctgagagggatgcctaccttggctttcttaaagctggttcaagtgattacccaactgagatcatgaagcgtgctggcgtagacatgactaagcctgactacttagaagatgccttcaagacttttgaaaaacggttgaacgaatttgaaagcttgattgagaaataaataatcgcgctcatataaaaataatcgatatcatttcgtgagatttgatatcgattttttgttgatgatcttgatttattacttggcatatttatcgctcaatatgtataatacgtatataagtattatagtgccagaaaaggtgaaaaatatggctgaaactttatataaaaaggtcgttaaaaatggttcttccttagctatcaatatcccagctaaggaagtaaaagagcaaaatctcaaagtaggcgatattgttgaagtaaaaatcaaaaaatcagaccgtcctaattctgaaaatttaaaagaaatagatggcttaatttctgattactgggatatgttagagtacttaaaggataagtagtcaatgaagatcaattatctaacagaaaaggatattttagtaatcaatgcaagggttattcaaagagaaggtgcaacgggacaaaaacctcacgttagggatgcagaagcccttcattttttagttgttcaacctaagcaaactagttttggacaagaattatatccgtcttttgctgaaaaagctgggattttattaattaaattagttaaaaagcatgtttttgaagatgcaaataaacggactacagcaattgcattcttactatttttacgacgcaattcttatgaactaacctgtgattggcaagatttagcaaatcaaatcttaaagatcgctcaaatagatgacaatgaactaaattaccaagaaatctatcaatgggttaatcaagtaattcatgaaaactaaaaataatcgatatcattttcgccctaatattatattttatatgaaataataaccactttataaaaaaataagggctattaacccttattcataataaatccatcaactatttcctatgtcatactactactcgattgacctgcataaccagctagtgtagcctgcaagtcatgaataactttaggagcattaaaatttttagcaaattcgtactgttgcaattgataatataatctagaaccgatatataaagcagaatcattattttccgcttgatcaattgttctatccaaaattcttaccaaatttggattatcaattacatctttactaaaacgaactttttctagttcattttttaactttaaagtctcatccttcttaatcattatttacaccaaaggatgcgcaaatggtccatccttctgccatccagtatacataatacgaccaacgctatcccacatttgtgctaaattatcatgacaataatatcggttgcaatatacaccattaccatagtaatggtactttccgcctccgcgcttgtgatgtgtaccgcctaaaacttgacttaattgattttcttttagttcttgaaactttaccattccagacacctccgataaatctttaagcctgcctcacttagtacttctatcaacttacatatataagtctaccaaaacagtagtgttttctaagaaaacgtcagaaactggcaacgttcatatcatattctgttaaaatacataatttgatcaagaatttagtacctgtcgatttaccaatcaaatactccagttacaataccgttagcacccactgctgcatatctttctagtttcagctgaagttcaactatagctttaggtagttcattttcactaaagttttctttcaatttcaaagacaaattagaagcaatcgattgaattgactcatgcttatcagctttcgcaatagcagcttgtaataactcaaccaattcggcatttttcttaacttgaggatctgaaatcactgtattcaatctactcttaaatgcagcttcttctttaagattctttttaaagaacatatttatctccttgtattaaccttgatttttcagaaaatcatacaactcagtagctgtttttcctccacctacccatgcgttagcaatttcaccgtttttaattcgcataacagtgggagtacctggcacttccaagttatcaaaagcataatctgcattatctttactttcatcaatatttaaatagtataattgaccaccaatcagattattaaattcatttaaagtggctgaatattgtcgacaataatagcacgttgggcgaccaatatacaaatatctatcaatattatcttttttatcgaaaaaagaatctacttcatctgaattagagactgtaaaatagtttgtgtaaggatgaatgattccttaaatttatttctttaaacattagaaaaaggagttcctttctcgtatgattggtttgaacaaaaaaacacatacagaaagaagaactccttcatgaatgattttaccaaagattttgctcaagctctattcaatccagacaaaataaatgatttattgcgcaaagagctacaacaggctgttaataacttgttagaagctgaattgactgcctttctgggctatgatccctatgccagaaatggctggaatactggcaactctagaaatggtgcttatttccgcaaagttgatacgcaatttggcccaattgaagtgcaagtgcctcgggatcgcaacggtcaatttcatcagcacacgctgcctggctacaagcagcactcggatatcttggaaagcatgattatcaagctttactccaagggcgtgaccaccagggaaatagccgatctaattgaaaagatgtatggcagccattacagtccagctcaggtatcaaatatttccaagcagatgattccaaaggttgaggcttaccacaaacgcaagctaagcgacaagtttttctgcgtctatttggatgcgacataccttcctttgcgccgagaaacatttgagcgtgaagcagtctatattgccattggcatcaagcctaatgggcacaaggaggtcattgactactgcattgcgcctagcgagaacattgaagtctggacagatatgcttcaaaacatgaaatcccgaggcttaaagcaagttgagctttttctttctgatggtgttgttggcatgaaaacagccttggccaggacttatcctaaagctcattttcaacgctgtttggttcatgtcatgcgcaatatctgcgctaaagtacgcgtcgacgatcgtgaaaagatcatgaacgaattcaaacaggtgcatcaacagacaaacaaagaagaagccacagctgtcctgcatgacttctataccaaatggggcaaggtttacagccatgttatcagaagcttgaaagacatagaaccagatctgctggtcttttataactatcccaagcagatcagagcttcaatttattcgactaacatgattgaatcatttaacaatgtgatcaagcgcaaagctaagcctaaggcagagtttccaactgaacagtcgcttgatgcttttattggcattcaggcaatgagctacaatgaccgttatttcaatcgaattcataaaggctttggtcaggttcaggacaccttagaatcctactttgattaaataaataattaaaaaatcaatttacgagaaagaactatttacacaaaagatttgacagtttcttaattggagacgctacaacttgccaatttatagctaaaatacctaaaattaataaaataaaaatatttgtatatttttattgctttttcatagttttatattcctacaaaaatctcagcagcaaaacaatggaatcacaattggtgccacaagttttactgttctaccaacatccttaccaaatttatagcaattatagcctcttttaccacctacacattctagtaagttttcatcttttaaactttcaaattttttcataattattcctcacctcgcatatttacatagtccttccttaaatccacgccaatacttaccttccgacttccaaaacttgttccatcctttactacctcctacaacacttaccaattcgtttgaacttaacttttcaaaaccaacagtattttccatttttatacctccgataaatttttaagtctacctcgcttagtacttctaagcgcatcatcaacttacatgtataattttaaccaaattaattcaatatccatgttatcgttatatattgttaacatatacatcatatttcactatgttacacaacttgataaagcatcattttactttgtatttccaaaacagtttaacaaaaaatcatcagtaatcgcgcttatacaaaaataatcgatatcattttgccaactatgatatcgattatttacatgctgtttgatgttgaatttttttattttctagatcgaaccagttaagcccgcaaatttccacttatctggattctcatttaacatgatctttaacctaattagtgcctgtggtaatttaaaaccatgtactagtgaataattattcaaatcacggttcagttcaaatactaccttatcaaaattaacaccctgagttaacttgcttaaaccttgattgattaacttcgttgcatctcgatcatttacagtctcttgtcttaattcctcaagaatttttttaagattttgtccattatcttgcaattttaagtcgcttccttttaattaacctctactgccccatggtccatattgtaaccatccattggctacggtttgacccgctttaccccaaattgcaccgtaatctgggatagttttatgtgtcttagtattatacaacatatatggagttaatcgaataattttaccaccaacaactctatttagctcaatattatttactaccttaaaattcttcatttccaatacctccgataaatctttaagcctgcctcgcttagtacttctaagcgcctcatcaacttacatatataactttaccagaatagcaggattttctatgacattgtcataaactgacaatattcacatcatattctgctaaagtacataatatgaacaaaactcatttagaatttagcaccctggatctaatataattaaagtagctagctcttcccgtaataattgacacttttccctgcatcccataccgcaaaaaatttctctctgacttggtagtttttaccatagtttccacttcaaacatacttatttttttctgttgaacagggtaagtacctatattagtaatttttccattaagtatttcagatgttccctgcttattttcaatattaaacttcatacgttgacccttatctagcacagccacttcagagctaggaacgtacgttattactcttaatttctttctatcccttatatcaggcatcgcaacactattcttattatctagatgaataataacattattttctaacataccttttttgccatcagctagagtgacactaattcctttagataatttttgcccttctttatattctttattctctaacgttactacccgatctggagtaataactcccatactattcatcacattttcatgcacagcaaaaaatgatccaataaatagtaaaatcacaaaaataaaagctggtaaaattatcattgtcgaaaagttacgaaaattatatgaatagaatttactactttctaaatcttgatcattcatttaatatcacctagcttttcaccaaatcataataatacccatgtttagccattaattcactgtgattaccttgttctacaatttgaccctgattcaataccacaatattgtcagttctttcagcaatagctaaacgatgcgcaataaatataacagttttattctttaacctaattaaattatcaaccacttttttctcagtaattgtatcaagcccacttgttgcttcatcaaaaatcaataccttagcaggtgaaagtaaggccctagcaattgttaatctttgcttctgaccacctgacaaaatcttagcattttcatctaattgtgtattaaatcctaatggcaatttttcaatgtcattctttatctccgcgatttggcaagcttcttctatctctttttcagttatattcttacgacttcccaacaaaagattctctttaatggtacctgcaaaaatatatggagtttgtggcacataattcacatatgagcgtaaaacatgcttatttatacttctagtcgaatgaccattaaaagttacttttccttttgtgggactgaaaaaatcaaccaacaatttaaccatagttgacttacctgatccactcattcccacaatagttaatttctcattatctttgatcgtcaaattaatatcttttaagacatcttcaccatatccataacgataatcgacatgtgagaaattaatgtctccatttaaatcatgactatcattaactgaagttttgcccttaaattcactttgaactaaataaacttcatttaaacgattctgagctacatttgcagcttgaagtgtaggttgcaagttaataatattttgtaatggatcaataaaatatgataataatgcattaaatgccatcaattcaccaatagacatctgattatgcattacaacacttgcccccacccaaagaataatgacattcagtgataatctaataaaagttttcaaagcagtttgaaaagcttctgttttgctatacttaaaagctttttttaaataatcaacaaactgactatcaatttttcgataacgtacttgttcactgtttaatgctttaatcgtctcaattccttgaatatcttcaataattgatgaactaactaccgcattactttccatctggtcattatttaatctttcaaacctttttgaaaagccgagaataacaatagcatagagtggtaatgaagctagcgtaatcaaaaacaatgtcatgttttgaaccgccaaaattatacccattaaaattacaattgaaagatcaaggaataatgaaatcaccgtacttgccaatgcatctataattctacttgcatcagaaaaacgagaagtaatctcaccagtttttctggtagtaaaaaattccatcggtaattcaaaaatatgcttaatgtattgtaaattaagatcgattgataaccgctgccccaaaacattcaataaaaattgctgaccatatgaaaaaattgagttaaagacatatgcaatcaataacccaatagctaaaacagataacgtggtaaatgtaccgttaggaatatatgtatcaatcaacccttgtacaaaatatgagctacagatactaatcagtgtcatcagcaaagcagctaaaataatgtttctaactaactttttctgtttaaacatataagggaataatgataatagattattctttttctcctttacaggcttaaaatctgccttaggcaccataaacaatgtaatacctgtccactctttttcaaacgcctttttggacatttttttaattccactagtaggatcaggatcggctacgattatttttcttttagtacttttaagaactacataataatgtaacaatcctccatcttttatcacatgaacaataaaaggatattgaatatctttcatattgaataaggacatatctgcttttaccgcttgaacatccatattgaatttttccgcagttttaactaatcctaaagcagtagttccttcagtattggttttagcaatatgacgtaaatgtgctattgatacttgagaatgataattctttaagatcattgctaaacaagctgcaccacagtctgtttcatcgatttgtggaacataaattgatttatacgttaacatgcccatcatttatctctttctgcttagctaatttctctgttttataattatatctagcaagaaaatctttcatcattttcacactactacgtgaaaaatcttcaacatccccattaacaaatgagacacgatgctgtttcaaatcaatcgactcaatgttcttcggattcaccaaacaagactggttaatcttctctaacataggattttctttagcatattgattaatactacctaaaagttgcatttcacctgtcgtcaagatcattaataacttgtgcggggttatagttgttgaaatataaataatatcatcaatattgacattcctagtttgacgtccaattttatacgaaaaagtcattttcttcatataattgaatttgtgtaagttgtagatagctacttctacagtctttaccatcatctgtctaaatttatccaaatcagatgtttttacaatgtagtcaattggacctaatcgtcttctgaatgtaattaatgataagtctgcatgactagttacaaagataatttgagctcgttcatctcgctttttaattaaggcagccagatcaaagccagtatcttcttccgtatcaccgcctaattcaacatcaagaaagtagataccaccatctaatttatgtttcttcagataatcaattgcacccatgtaatcagttgcagatgcaattgaaaattcaatttcttcatcatctgacaaaatcattttcgcagcaccaagaattttcttagtttgctcaatttgattttgatcatcatcacaaataaatactggatattgcattttttatttttcagtcccactttcactatcaggcaaaattgttaaatcaaaagtaaaccacccatcatcaacatagtaattaacaatcattgaatcttcatatttatgagtaatttcttttacattcgctagtcctaaacccatatgatgtttcttggttgtataattcttttgacttattttatctgtcgctactccactttttctaacgcgatttcgaatttcaaactcgaaatcgccgttttcttgataatacattgcatctattcgcgcactattagagttacctgtttctttgatcaaggcctgactttcttctgcagcattatcaaacgtgataccaattattctgaccagatctaaaatattaacactatcaggaattcgagaaatgtcgtgttcacaatcgaaactataatctagacctaaactgtagagttttgataacttagcaattgcaatactttttagattgttttcatggatatgatttacgcccttatacttacgcaatgcttttttattaaactgtgtttcagtgtagtgatcgagaattttaacaacctctttagagttaccttcttgagcgcttacttttaaaccatttaaaacattttgataatcatgcttaaagcgacgcaaatcatcttcgtttttgtcaagataacttgaatattcccgtagttgtttcatttcagaactcaattgctgctgcttaagaatcaattccttgttttctgcttcttttgctttcctgtcagcgtttgccaattccagctgcaattgttgttccttttgctctcgtttggttagaagatctttttgaattttaacagttgtcaaataagcaaatacagaaaaaattatttgaagtatcaataaacttaaagatacttcaaataataccgtcatatgtgtactctgtaatgctgaaactgtcaaatcttttgtgtaaatagatctttctcgtaaattgattttttaattatttatttaatcaaagtaggattctaaggtgtcctgaacctgaccaaagcctttatgaattcgattgaaataacggtcattgtagctcattgcctgaatgccaataaaagcatcaagcgactgttcagttggaaactctgccttaggcttagctttgcgcttgatcacattgttaaatgattcaatcatgttagtcgaataaattgaagctctgatctgcttgggatagttataaaagaccagcagatctggttctatgtctttcaagcttctgataacatggctgtaaaccttgccccatttggtatagaagtcatgcaggacagctgtggcttcttctttgtttgtctgttgatgcacctgtttgaattcgttcatgatcttttcacgatcgtcgacgcgtactttagcgcagatattgcgcatgacatgaaccaaacagcgttgaaaatgagctttaggataagtcctggccaaggctgttttcatgccaacaacaccatcagaaagaaaaagctcaacttgctttaagcctcgggatttcatgttttgaagcatatctgtccagacttcaatgttctcgctaggtgcaatgcagtagtcaatgacctccttgtgcccattaggcttgatgccaatggcaatatagactgcttcacgctcaaatgtttctcggcgcaaaggaaggtatgtcgcatccaaatagacgcagaaaaacttgtcgcttagcttgcgtttgtggtaagcctcaacctttggaatcatctgcttggaaatatttgatacctgagctggactgtaatggctgccatacatcttttcaattagatcggctatttccctggtggtcacgcccttggagtaaagcttgataatcatgctttccaagatatccgagtgctgcttgtagccaggcagcgtgtgctgatgaaactgaccgttgcgatcccgaggcacttgcacttcaattgggccaaattgcgtatcaactttgcggaaataagcaccatttctagagttgccagtattccagccatttctggcatagggatcatagcccagaaaggcagtcaattcagcttctagcaatttattaacagcctgttgtagctctttgcgcaataaatcatttattttgtctggattgaatagagcttgagcaaaatctttggtaaaatcattcatgaaggagttcttctttctgtatgtgtttttttgttcaaaccaatcatacgagaaaggaactcctttttctaatgtttaaagaaataaatttaaggaatcattcatccttacacaaaatattttacagtctcttaattttaactgtgaaaaaatagactatcattgtagaaatataaatatatgtagtcaactctacaaaaattagtccatttttattcattaataagttgtaaatatgacttttgttcataactatcagtagggcaaaaattattccaagaataagtgatagcaaataaacatcattactaaaaaagctaagtctggatccgaaaatagtcataattattgagcaaaataaatcaattaatccaaaaataagtgcagctccccaaaaaagcgtgttagctttactctttctacttattttgaaataaaagaaaatacttaagatttccaacaaatctgacacaaattcatttatatatccatttgcatcccctaaggataaggctacaaataaaatgataagaaaaatatccgcatatttatatttttgtcttgcaacttgataaaagatccataaatcaaataaaggtgatacaacagcttgtgttaataaaagccacattagaacttcctactttagatgtaacatccacttaattaaattgtgtctatgcttacttgtaaagttagtaacacataaaaaactaacagtaggatcagcaaatccacccttaacttcaactaattctttttcatttaacttcttcacttaaacttcccacacgcagaatcgctccttttattgtgattctgcgttttttaacaaatataaaaggcacatgaccttttcattgctataattaaagtgaccaaacgataattctatgcatgaaaggcttgtgccaatgtctattttaccatctcctgaccaacaaaatgaacaactattttcaaactcaatcatcagcttcatcaagaagtttcaggtgatcaagctgttgagaaaatgtggcttccgcaaggaaaaaggcattagcctgttcagcttgtttctttacgttttaagcaatgtctttcgtgaccgcagcttatatatgcagctgaaaacggatcattttaaagaaagcttttctaaaaattcttattaccgatttatgcgcaacgtccacgtcaattggctccacttcaccacactgctttctgcgcaaatcattaataatcacttgcgatctttgacttcagaaaaacgggctgattgctttgttgtcgatgattcctacttctctaggaccggcttcaagaaaacagaattagtcgccaaagtttttgaccatgtatcaatgacttacaagaaaggttttcgcatgatgaccctgggctggactgatggagcttctttcatgccaatcaattcggtgttgctgtcctctcacaagctacagaatatgattggcgaaaacaaagtctgtgatcagcgcaccattgctggcaaaagacgcatgcttgcccggactaaaggcacagacgtgatggttaatttaatcgaccaagctatgaaagcaggtcatcaagccaagtacgtgctgtttgacagctggttctcaaatccacatcaaatcgtccagctcaagcaaaggaagctggatgtaattgccatggttaaagttagctccaaaatcaaatatgaatttgaaggagaacgcaaaaacatcaaacagatttatcgtagctgtaaaaagcgacgcgggcgttcgcgctatctgttgtcaattccagtcaaggttggccgccaagacaaagacggtgctaaaattgacgctcggataatttgcgttagaaaccgtgccaatcgtaaagagtggctggctattatttgtaccgacatgtcgcttagcgaagatgaagtcattcgcaattatggcaaacgctgggatattgaagtttttttcaaaacctgcaaaagctacctaaaactaagcacggaatatcatggtctgtcctacgatgccttgactgctcatgtggctatagtctttacccgctatatgctcatgtcagtagccaagcgggacgacgaagatgagcgaaccttaggtgagcttttctattgcatgattgatgagctggcggatattacattcagtcattcacttcagctaatcacaaaagcaatggtggctagcgttgaaaaagtctttcatgccagtgaagcacaaatagcagaattcacggctgactttatcaatcgtttacccaaatacatgcaaaaattgttaaagaaaactagcaaaaatagtatagaagcccaaagctaagcaatatcaaagaattgccagcttatttgatgtgggaagtttaagttcttcataattcaaatcttcctttcaactctttaactttttacatcaccaatattactatgcattcaattttatacacaaagtcgtcatattctgtactattttaatcatattctgcatttttatttaaaaagcacctccaccagaactatttccataaccatacgaattatttttaaagacgcggcgtctaatttttgatcttccaccaacaactttcttcaagactagaatagatagtttttgcataatttttcctctctttttctcaaaaaatactatagaaaaacatacacccatttggactccaaaaaacatttcatcatattctgcctcatttcaatcatattttgcaaaacatcaagttactcaatatgagacgcttctttcaattttatttaaaagatcactacttcgagtcctccatcttttcggtatcattttagctcatttgataccgctaaattaataatgataccgattaaatactaaaaaagactgacaattcatttttacgtggattatcagcctttttgattactcatgataaatatcttgaaccgccataccccaatatggaatatattccatatacgcgtggtgctagttaaatctttctagacaataagccaaattataagctaaaattgcaatttccaaccggctttgaaagcctatcagactacgtgctcgattgttctcggcattgtaataggtcagaagcgaaaagtcgctttcaattgttctgcgaatagccatcaattgatgatcattgtgctttttagctcctgtcatatttttacgatatggtgtccaaagttcataacccatttgttttagctgttgatgcagttctttgcctaaatagccttcgtcgccaagaagatagtaattagatggatgtgcattttccatcagttcaactgtctccttggcatcatgaactgatgcttttgttacgacataatcaagaatgtaaccgtcatcgctaacaatggcatgaactttgaaaccatagaagtaaattttcttggtggccttataaccaatgttggcataaccgcgaaaaattttagcacgatagttgcgaattggttggcaaacaggtaccggaaagctgtcaatgatcaagaaatgtccattcaggtcaacctttttattcatttcttgccgtatctgataaatcaattgcaatagctgacgtgaacgccgattaaaacgtgagtgtgataaacaattgaaacattcacagaatcttctttgtgattcaattcctgtcttagcttgccagataagtaaagccaaaatcagactgtccgtagttttaatttgatcaatatttcgccgatgagtaaactcagccggtgcatacaaacgataccagtgccgacaaattatcactaaatctttaaaactaacttgtaaatggtggctaaaacgcttaagcttaaggcagttcaatcagatcagactcttttctattattactatttacaagtcgagtctaacaagattggacttttttattaactaaaacgatttaactagcaccacgcgtattccatatatcttttacttgcattcttatcatatggttttattaaatacgcttctaaacttgatgcaattgccttagatacttgagaagcatctttatctgataaattaaatgttttacgaattgaagagttactaatcttcatgtcatttacatatttcaaactagcatcccagtaaattgattcattcttttcagtaatagccaattcactaaatgctttttcctcacgaatagttacttgcgtagcagtggtacccttgcttaaaatttcgaccgttggtaaatgagcctcttctaatgaataaaccactttatcaattccagtaccacgtgattcagtaatatgaaatttacttaagatattagccaattcaggattacgggatcgaggtgggacgtctaaaaatctaagtggttcaatcaaaggaattcctggtgctgtgcttgctggtagtattgatttatcatgtttgaattttttaagacaccattatatacaaatttccagcaccaaaatcagaagatgtcgtcactgctatcttatgccagctaacattgccattcattggttgaggaacttggctctgtatcacctcagaaaaatccttaatttgatgtagattcaactcatttttacgtgaattatcagcttttatttatatctaaatcattcctgcaattaaaccaactacatataagaagacacagcaaactactaaatacaaaccgccccacttcacggtctctttcagtatttcgccttcatcaccttcgcggttaattgaaccagttgccacggcaatattttgcggcgacagcatccctgccgttgcgccagtcatgttcgatgctacaacccagtacttacttacacctaggtccattgcagccgacagttgtaaatttccaaagagaacgttagctgaagtggcagaaccagttaagaatgttcctaatgccccaataagtggtgcaaataatggataagctggccctaataagctaactaaggccactgctaatgcatcggtcattcctgcatagaccattactttggctaatcctacaattgcacaaaccgtaattgttgtcttccagacgctcttaattacttgtcctaaaatttgcatcattttcttaaaactaacgccctgaattgccccaccgattaaagtagcgacaaaaagcaatgtacctggagacgacaaccagctaattgacaaggtattcggatttttccccgtataaacaaccaaattagttgtcaccttattaagtaaattattaactgctggcaccaatgatgatgcaaaaataacgaagatgaaaactaagataaatggtgaacatgccttgagcatttctttagtacttggtttttctacatcaggttcttcttcctcatcatgccatctagttaataaaatcgtaattgcgattgaacaaagtgccccaacgattgctggcaattctgctccaacaaacttagccgcaattacttgcgggattgccatgcctaaacctgacatcaaggtaattagtccaacgcctttaattgctttaatagaaccttccgttaaaattactaggataaatggcaccagcacaactaaaacaaataattgcaaggtcacgatgaaggataattcttcttgctttaacccagtcacttcacccaaggtaatgatcggcaagccaattgcaccaaaagctgtggccgtggtattagcaatcagactgattactgatgctctaattggctccaagccaaaggcaatcaaaatcccagcggcaatcgccaccgcggttccaaaaccagcaattgattccaaaaagccaccaaagccccaagcgataatcaaaacaataatccgcttgtctgttgaaatcgtcgccagcatatcttgaatggtcttcataccacctgattcggtagtaacattatacgcaaataaggccatcacaattacgaacatgatcggccaaatgcccatgataattccttctagcgccccacttgccgtatctagcaccggtaatttaaaactaaagactgctaacaccatcgtcaaaattaagccaatgacacaagcgcgtgcagctggcattcgcataactcccagcgaaataatcaaccaaacgatcggcaacaatgcgatcgcaaatctaatccacatcaaagtcctccatcatcaaaagtgttgtactatattatttaatcatgatttgggtaaaaagttaaaataagacacaaaattttagttaaaattacaattttcacaaatttcacttgcaagttttaccaacaaactatataacaattaatggaaagtaaaatttctcacatcatgtttgaactactccgtggaatagagtagttctttttttgcgtaaaaaaatagccagaccgaattcagcccaatgtcattaagttaagacattgacaaattatcgacttggacttttaagatcattcatttgcgatttatcgcatttgaatgctcttttttcatgccaaataaacccaaatcttgtttagaaattaggctacacgatataaataatatacagctgatttgggtttgagatttcttttgtcttttcgtcctggtctgatcggaattgtgtaatgactaatttgaataagaatctttttaaagatttcagttgaagaagaaattatatacatagcctggatgacaaaacatgactgtttgaaattgatcgcatattgatacttgcattttttttgtggtacatatgcttgagcatcaatttgactgactgcgttaaacataatcatgtgggcatagatctccatttcaataaatctatcctgcttggaatgaaactgtacgctacctaaagcatatttcaactttttgaatgaagtttcaatgccccagcgcaaatggtagatttctttgatcctttttaagggataatcggctctatttagattagttagaacaacttcccattcttctttgcctgatttaggatcattaattctaaatttacaggcacgaaattttattgtacataactctccaaagtcccagctgccatctttggtatttttagaccgatattttatatattgacggtaatgatggttaaccaaatgaacgttttctgtagccttatgggtttcataataataattagaggtagtcacccagcaagctatatccttatcacactcttgattaggcaactcagctacttccttaaatgcgccatatcccgttttagtacgtatgacataataacagttaggcaggcgattacaattttcaatcatgttaaagccggtataacctcgatccatagtaactatatatggtccgcaatttagctttttaagcatttgaatggcggctttacgttcatccatctttgacttaggctgaaagatgcagtcttgataagtattatttaacaggtcatagagtgcattaacatgaatttggcaatatggctttcctttatgattgagatttccaacgatattctctgatttaggattccagatttgattaaaatcagacccatcaatggcaaatatacgatatttatgatcaaataactggatattaaataaattctgattaaatacagttagaatatgcttaaaacatgcgggtgaaagctgacctttgcgttggacataagcggaagtactgactactttatcgttatttttaatagctttttggccaaaagctctaaacaactcactggtcaaatcttttccttgcatattaatagtagttttaatgactgtagctgcatctaaaaaccgcttcctagtgaaggcatgaggatcatcgataaaatcatgaatatgctttccagtatcattgataatttgatcaagacgatctaaaatatttctgtgaagggctttcataattaacaccagctttctggcaataattttgaaggtttaataatttaatcagagggcgaaaaggtaggttcttttcgcctttattttatgcaaaaaaagaaccaaatcataatgattcggttctacagagattagattcaatttgtcaatgtcttaacttaatgacattggaattcagcctgacttctgttttttttagcgatgtttaattacgtgaataccataagcgattaagtaaattaccacttcgatcgttgcaataaagaaagttaccggccagttggtgataaagccgagatacagtccagcccacacgccaactaaagcgaaaaacacggaccaactgatcattgctggtattgttttaccaatatagcgcgccgttgaagatggcaatgttaatagaatgaagactagcaatgaaccaacaatctgggcaccgatagcaactgacatagccaaggctaccaagaaagcaataccaacccagccagtatgtacaccatgtgcaacggcaccgatatggtcaaatgagtcaaaattcaagcttcgagctaccaaaataattaatagtaaaactagaattgacaaaaccactagctgaatcacgccttgtttatcaacaccgatgatactaccaaacagaatattagtagcgtaacggctatttgatccagaaatggctaagaacagcacacctagcccaataaacagagctgagatcgcactaactgacgattctttttgatcgctgtgcaaggacaattctcctactccaattgaaccgagcaaggtaaatagtagcatcccccataacggtgcaatgccgataaagacggcaaaagctgctccagcaaagccgatttctgacagtgtgtgagctaaaaaagcataactccgtgctactacatatacaccgaccacgccacaggtaatcgcaatgaatgtactagctaagaaggcataacgcataaattcgtattgaaacattattcgaaatcctccttaaatttatccatctttccttgcctgatcgttcccttatttaaatatagataatcagtcatatactttttagctaaaggaatatcatgagtgacaaacaaaacggtaattttgtgttcacgattcaggtgcttgattaatcccatcaattcttccttagcagccggatctaggctagctgttgcttcatctaagatgatcatattgggatgatcaagtagagcctgcgctaaatatgcacgttgtttttgtccacctgatgcctcacccattcgggtattctgaatcttttctaaatgagtttcttctaactgatgatcaatctgttccttaacctttttggtcttaaacaatggggcgttaagtccaataaatgcgcgaatcgacaatggatactccgcatcaatatttctaaactggggtacataacctaacttaacgtctgaatcaaacttaaagttgcccgcagtcggctttaacatccccattaaaatcttaattaaggtggtcttccctgttccattaggtccaagtagtgcagtcattgacccgtcttcaagctgaaaactcaaatcttgaaaaacatctttagtatcaaatctcatcgagagatcatttacttctaaaatcactcttctaccccctccctaagttgctattatttttctattttagccaaattttgataattttctttcatccaagccaagtaagtagtgtggttaggaatagtctcccgcacatttaacactggaatattattttccttagctaattttacaaatgacttcacagttgaactgcttgcctgtgtattgttaacaaagaatgcaatcttttttgctttaatttcattattcatttgattaatcatcttaggactcggatcagtaccattctcaattgcttcttcaaagcccttatccccaatcttgtatcctgcttctcttaaagcataatcaaagacaggttcactaacaaagactggcttactatttttcttattagtcttcaccaattgcttaacttgattaatcttagctaaatacttgtcaccattagctttaaaataagctgcatgctttttatcaagcttagataaacgcttaactaggtaattaacatacttggttggcatacttagattgtaccaaatatgcggattatcccccttctttaatcccatcaagtcttcaccaactaagacaggctttttgctaacagaactagctagcttattcatccaagaatcatagcctaagccattagcaacaataatatttgccttggtcaattctttagcatctgccgtagttggttcaaaatcatgaggatcggtactgctattgctaatgattgccttagccgtaccatattttcctacaacatttttagcaatatctgcataaacattggtggtggtaatgatcgagactttacccgaattgctcgtcgaatttgatctattcgagcaagctgaaactaacagcgcaataacgccaattagtcccaaaaaagagattaacttcgtaattttagatttcgcattttgcataaaatatcctccttgtgcaaaataaaaaagcatttaagttagaaaattcagcataaattctaactaaaagttagaataatctagttaattacatatgtcaacatatttttgcatagacaaatagcaccagtctcccataagcctgatgctatcaataatttaagtcataaaattttgctgaattttattaaatgctttgttctaaaattacattattatataaacatatttttatataattgtcaaactaaattaaaattcttccttcacgtgctgacgcaaaacatctaagattttaatcacatgcttatcttctaagctataatagcgctcctgcctaacccgctcgctcttaactagcttagcctcttccaaaatacgcaagtgacgcgaaatagctggctgactaacatcaaactgcttaactaaattattaacactacttttttgattatcatttaaataatataggatttgaattcgaatcggatgattcaacgctctagtaatccgaataatttgctcgtccaatttcttcacccattcatactttttaatttattatagcttaaatttaggtataaaaaaacgctacccttcgggtagcgcaaaacataacagagtatcttgatttaagtagagatcatcaagatatttatattataatacgtttttgccaaaatgtattgttttttgattaataaccagaattatttaataataataatattcgatattacttatagtattattcgtttgggtcttctttgacattcttcttccagaaactcatgattaaaccagcaacgattgaaccaataatagtagctaggaagtagaataagatgtggcttggaccaccgatgttaccagcaagtggtgatacccaaagaccaccgtgaggagctgggacaccaacgtgccataaaccaactaaagcaccaccaacagctgaaccaatgatacatgatggaattacacgacctgggtcagcagcagcaaatggaatagcaccttcagtaatgaatgagaagcctaatacccagttagaaacacccgcacgacgttcttctacagtgtacttgttcttgaagaatgtagtaccaattgcagtagcaaatggtggaaccataccacccaccattacagcagccatcaagatagcagcagtagctgagtgagggtcgttagcaaatgcacctgaagcgaagacataagcagccttgttgaaaggaccacccatatcgattgacatcattccggcaaggatagtggtcaaaagtaccaagttaccagtacccattccgttcaagaaatgagtaatagcaaagttaatgccactaaagattgggttaatgatgtagaacataattgctgcaataaagagcaatcctaaaattggatagaacagcattggcttcataccttcaacagaacgaggtaatttagcaaatactttcttcaaaccaaccatcaagtaaccagcaataaaaccagcagcaataccgcctaagaagccggctggtgaagttgcgtgagcttgaacgttaacttggaattgaccgttaacaatagaggccatgtaaccaccaacaaaacctggcattaaggctggcaaatcaccgattgattcagcgatataggctgccaaaactggaaccatgaaggcaaatgccaagttaccagcattgtttaaaaagatgaaagcaggagtcttagcgccacccatgtagttttctacgatgaatgagatcgccattaagataccaccaccaataacgaatggaagcatgtgactaataccattcatcaagttcttgtagatacctgcccacaaacctggcttctcagttgatgaagattcagttgacttgtcttgagcacttgcacggtaaacatcagccttaccacccataatgtcatcaatcaattcgcctggcttgttaattccatcaacaacaggacggttaactaagtgcttgccgtcaaaacgtggcatatcaactttcttatcagaagcgataataacacctttagcacgcttgatttcatcaggagtcaacttatccttaaccccttctgaaccgttagtttcaattctaacttcgatgccgcgcttcttaccttccttaatcaaggcttcttgagccatgtaagtgtgggcaataccgttaatacatgcagtaacaccaacaatcaatggcttgttgtcgtcatcacttgtaccttgagccttagcagcttccttagccttcttagcttcagctgccttcttgtcttcttcgtcttttttagcttcagccttttcaaaaagatcgataacttcttcaggagtcttagtattcttcaaagcttcaactaaatcaggatcaattaacaaacctgaaagttttgctaatgcttgaaggtgagtattgtcagcaccatctggtgcagtaatcatgaagaataagtgaactggttgaccatcaagtgaattatagtcaattccttccttactcttggcgaataatacgcgtgccttgttaatagatttgttacgtgcgtgaggcatcgcaattccgccaccaataccagtagttgattcgttttcacgtgcccagattgacttaataaaagcatcttcgtcgttaacgatatcagttgctacttcaaggtcagccatttctttaatggcatcttctttgttcttagccttaagctccataatcatggagtcagggcttaaaatatccttgattctcatatttttcccctcgttttttattaagaaatttgctcaactttgatttgtggaagaacagcatcaatttggctcttaactgcaatgtccttagtaaaggcagtagcagcaccacaagccattccaattctgaagccttccttaggatcttgggtcttgtagtaagtaccaacgaagccggcaatcattgaatcacctgcaccaactgagttaacagcagtaccaacagcacccttagcatggtaaacatgatccttggtaagaaggaaaccaccttcaccagccatagaaaccatcacattttgagcacccttatctaaaagcttttgtgcgtattcaagcatcacatcacttgaatcaaaagttacgccaaacaagtctgctaattcatggtggttaggcttaattactagtggcttatatgccaaagtatcaagtaaagcttgtccagtagtatcaacaacaaattctgcacctgcttctttaatagtaggaagcaatgattgatagaaatcagttggaaggcttggagtaagagaaccgctcattactacaatgtcgcccttctttaaatcgtttaaacgatccttaaaagcagtgatttcttggtcggtaatgttaggaccagccgcgttaatttcagtttccttttcagcgtggatcttaacattcacacgagtgttatctgaaatagtaacgaaatcactttcaattctcttttgattcaattgacgaaccaattccttaccagtgaagccacctacgaagccccatgccgtattatcaacatttaattggttaaggatttgagaaacgttaattcccttaccccctgctaaaaatgaatcattgttagttctgttaacttctccgcggttaactttttctaattgaagaacatagtcaagcgctggattaacagttactgtataaatcatcctattttgcctcctctaattcaataccgactggtaatgaccgtttttgacctggttttagttgatcagttaccacaatcacgtcacttgtattggcaaacacagcaaagttacgctcaccgattttactattatcagttaatacataagcgtgtcttgcctgtttgatttcggctgccttaaccgcagcttcctctggatcaggtgtagttagattgccatttttttcaattccattagcaccaacgaagctagctgaaaaattcattgccttaatctgacttaaggcggtctgacctataacagcatgcgtatcgtccttaacttcaccgccaattagaattgtgttaattccgtgatttaaactgcataaagcagtctctacaccattagtaataatcttgacgttagcaacctctgctaaaaatggtaccatctcataagttgttgttcctgcatcaatgaagacattgtcacctggacgaacaaaattctgcacggcatatctagcaatagtgatttttgcgtcatgattcaaactgaagcgaacgttttgtgatacatcacgagaaaaatgtttaactgattgggcaccgccatgaacacgcttaaggatcccatttttttccatctgaattagatctcgacggatagttgattcagatgttgcggttaagtcacataattcacttacgcgacataactcgtgttgattaacatagtcttcgattaagctttggcgctcctgagtcagcatcatttctcacctcgataaatattgtattcgctttctcctccaaaatcaatcattttttcttcaaaaaatgtcatttttatttattatcgttcaataacattcatttatatgcaaaaaagatgccgttttttgattgaaacgacatcttttcttcgtcatttggaattattcttagtcgttttaccctatttgactaagaatccgtaaagatgactaagaaagagaaccaaagatctattaaccttgcaaaagcaaaacacgctgaatcattattgattcagcgcgttttactattaaatatattttgtctagcctctcaagctacgcttaaagttttgccatgggccgacatcatctgtttgcaaaatcaagtttggatagatttttctaatccagataaatgacgctactgtagcggctaaagcaattaaagcagagatagctgcctctaaattagttgcgttacccataattactctagctggcattacaaatgatgatagaaacgggatgtacgataatactttagcaaaaatcgtatccccacctgattgcatattgactgtgaacaagaacccgatcaacatcaatgtagatagtggtcccaccgctttgttggcattctcgcttttagcaaccaaagcgccacagaaagctgcaaagataataaacaataccaagccgattatcgtaaacaccaatccccaagaagccagattgccaattgcttgatcaatcatcggcttatactgtctaaataaatcgctaaagccatcgatgtatggggccgcgcaataaactgccacaaaaccaacaacataaattaacacttgggtgataatttcaccaaaaatacctaaaatcttcccagtgaaataatcgccacctggcatactcgaaaagattacttccattatcttggtacccttctccgtagcgatatcttgtgctgttacttgcgtataagtgatcacaagcatgtacaagataatcagcaaaacccagaaggaaatttgcttaacaggatcattatcaaagctcttcttatcaacatgcttaacttgttgcttaaattgcgctcgcgtagctaaagactgagtctgttttgtcgttagcttggccttacttaaattcaattgttgctgggcggtgtttaggctagttagcagctctgattttagatcactgtccattttttcatcactatagtaagttgcagctaattgattattcttttgttcaattaaaacatagccatcgatatcttcatctttatacgcctttttagccttagcttcagtgctatagttgtcaaagtcttctgactttttaattgcttgctttaaggcagaattagaagtaactaccccgacatagttgtcatcactgccgccagctgataccattccgataacaaatgaaaagaagacgagcagaaacggtgctaaaatcatcagcaaatatgaccaagttttcacttctctacggtaggtttcttttgcgacaagccagatcttattcatgacgcgcacctgctttcattttgaaaatctcgtctaaagttggaggttcctggtcaaaagtctggatatattgaccggccgaaagttggttaaaaatatccttaccatatttttcgtctgcaagaataagcagcttcattccattgttttgcaaaattatatcttttacacctggtaaggctgataattcagtagcacttttgtctgtcctgacaaaaattcgagttaggccaaagctgttcttaatttcatttactgggccattcaagacgatatgcccatcattgatcattacgacgtcatcgcacaattcttccacgttacgcatatcatgatcagaaaaaatgatcgtagcgccttttcttttttcttccaaaatcagctgcttcattagatcaacattaacaggatctagtccactgaatggttcatctaaaataatcaatttaggttgatgaattaaagttgcaatcatctgtactttttgttggttacctttagacaaagacttaatcttatccatggggatccctttaacagccaaacgtgataaccaatcaggcaattcttcttttacctttttagccggcatccctttaaggctagccaaaaacactacctgatctgaaatagttaacttaggcatcaaacttcgctcttcaggcagatagccaatattgtcataatctttagcgttgaaagaatgtccatcaatactaatctggccgtcataatcaacgaatttcaaaatactatgaaagatcgtcgacttacccgacccatttttaccaaccagtccaagaatacgcccatctgacacactgaagctaacatcaaacaaaacctgtgttgacccgaagcttttatttaggtgttctatttttaacataatttttcctcaactttttatctaatggttattagacctagaagtacaccgtcaaagaactgccataaagtatcggttgaaaaaattgtttttacaatatcaactgacccccaattggttactaaagtaatcactacaccagctgaagcaaccactactcctgtaccaataacttgaggggcaagtttcaacactttcttctgccatggaatctttgatgcgaccgttttattaaggactaagcttgcggacatgatgccaccaaacattagaccgaaagccaatccggctccaatcgacataataatttgaaaaggttgaggcgaaccagcagtcttaacatacatcatcacaagagctaatattggtccaacaagtgctccaattcccatgccttcaataattcgtttgttttcacgagcaaatttttcattattcattgttcttacctcaaggaaattttcagctaattaaacaaatccgaaaacttagtcggaatgttgttcttggcgaagtatttcttgaatgcatccccaaaactcaattgatctttttctctattttcaagcaaatcatgaacagctaagaatgctgtaacggcgtaattaacggctaaaatgattaacaaaccgagcacaatataaattaagtacagcattgttctttcctccaattcagcgattatctcccaggaaataatcttttatccttttaaattaatcatatccccatcatttatgtaaaaggtaaaaccgtccaattctgtcatttttcggactgattttgcattttattcttcatcttttttataaactaataaatcccctggttgacaatccaagacttcacagatcttgctcaacgtgtcgaagcgaacgccatgcgcctttcctgtcttcagaatcgacaggttagccggcgttataccaactttctctgccaactcctttgaagacatctttcgcttcaagagcataaaatctagtgtcacttcaatcatctatatcaacctttctaaataatcgagtctgcatcctcctgaaccttcattccgtacttgaataccaagtagactacgtatagtactgctaggaaaagcaaaccagttgtcacaccacttgggtatagtacattattcgaggatttagcgaaccaagtgcggtgagttatgaaaataatgtaatctattattgaaataagggtatatccagcaactgaaattaataatttcttgagtaaattcaaattactatcagcaaagtaaacttcttgcttgatattcttaacaattaatctggcatatcgacagattaaaaaggctgcaacgctcatcatgatcagtgatagcaacacaaccactattgcaccgatatagttatcaactgatacgccttttatacccctaccactttcaaagccagcacgaaaatccggattatgtataccaaataacacaacacctcccataacgatccacataattattcctatcacacaaaatatttggtaaatccaagcaaaaatcgtaagcaaattcaaaattaattttttcatttttctatcctctcaaaatatggatgattctgtatatagcactgccaattacacccgttactccaattactaataatgtaattctaagaacactccatgttccgcctaagttagcaaacactaagattgccatcattatcagcattccaataattgaacctatctgtcttttcttttctggaagcatatctatccctctcttccataaaactatctatctctttctcgtcttttgtaattattgtattacgataatttataattgcaatacagaaataaaatatttttttgggataataaaaaaataccaaattagtcgttaaactaacttggtattatgttttatcttccaagctactgctttttacttttcttcttatagtaagagttcatgaaaatattcataaagataacaaaggctacactttcaactatattccaaaatactgttccaaagcttaatgttttgtactgaaaatagtcccataccaatcctattaacagggccaaaataccagcgatgatacttctgtttctaacttggcgctcggttaaaattttatttttcataatttttaccccattattatcatatcgaaaaataggaaatctattaaccgaattttctattttttaatattatctatgtttatgttttttatgtctattttgtttggcgaaatctttaacagcgccttctacacatccttttatcataccacttccgctagggagcgcatcaatgaaacccgataaacatgatccacctacaccaagccagttagtgccaccacttactttttctaattctttataattcatttctttcatcataaaagttacctccttttttacaaatgtgatacacaagaaactgatccgctaataatacccacattagcaccaaatatagctccacctactgtaccaattggagtaccaaatgcagtgcctgcaatgccatattttagtccatccttcaacgctcccattccaatagctttagcacaatttgtgatttttctacggcgtcttgctttaccaccgttaccaccgaaaacagctgacagttcttcataagttaaagtttcaaatttgttcatgtttttcccctttataaaacttctaattacaattttcataagtgaattaagttttacctctcttcaacttacacactaataatacaaaacaatttaccttcattggcgtataataccgatttagcacgaaacaagatctatttggaaaatatttaccaaatcggccaagttttcgtatattagtaatttacaaaggattcttattaattgttacgctaacttgatattctgttttataaatccgaaaactagtaaaaacatagacacaatgcacttattatgagaatggctaacaaaaaaatcttctcatagccaaggctacaagaagattgccatcacattaatgcataaactgatacgcacgctctttactttaataaaacatgatcaattatacgactataacatagccactcaaaaccaaaaacttgagtcgaaatcaaataatcatttttagcatagtaacctacgaaaaaaatcacaagtttcataggtttctttgcgttatcttctaagtattacgatattttctattggagatatttttagcctattcgcaccagtatttttttcaatacttatctactagttattatctacctctatgaaaagaactttggaaaaacttaggattttccaaataaacgtctcgtttatgattaccacctttcttactgtataaaggtagcatgtgttcagtatcagttagaccaatatcatctacagaacctgacccacctaaaattccgcttaaaagtacttcatctttagaaataatgattcgtttcatctacttttcctccttagttttctttcctaatgaaatgcccaaaactaaactgattaagatactaatcattccaattaattgaccccagatattatccttctcacctgtagatggtaaagactgagtagaaccatttttaatagtgtcattttccaatcgctttaacttagtaattctattttgattgttcttaacggcactataaggcttgctttgcacttttactgaatcaaattgtttattttctttcacacttccgtgtttttcactaactgctgctagaataatattctttttatgcgatttagctgttttcttgaccttagtggctacgattttaggttttactggcttcttcacagttttcttcttagtttcagctctaggagccgcatactcttgattacctgtcgtaactttagtcagatctgcagtagagctagcaacatttgcagcattctcaaatacgctattttcaacaaagtcagtaatagcaacgtcattgctagactgtgtttgatcatcttcagctacagtcacttcaggtatttcattactttcagattcagtagtattatcatccttcggttgatccttaattactgcctgttccactaatttattagctgcatcagaatacaaaaagttatataactcttgtcccgtcttttctccaccgacccatgcactaataatttttccattaataaatctcattgtagttggagtacctggaataccaatttctttgaaggcatactcatgtgctccttcttcagcatcaatattgaaataaagcagcttacctttaacgatttcattgaaatcttttaaatcaggtgaaaattgtcgacagtagtaacatgttggacgaccgatatacataagatgttcttgattatttttctctgctagaagatcttttacttcttgcatttttactctatgaaaatcttttacattgttctcataatcttcaacagatacctcatcttcatcatcttcactatcttcctcatttgcattattaggatcttgattattagtattctgtgactgattattttgatcttcagaagctgctggctcttcttcctgcttattttgagtttgagctgcttcgttcttactactagttttctgctcagattcggaaacatttttatcatcattttctgttttagatactacttcacttttattctcttgagaagtattaccttcatccgcatgcacaatagtactattcatcatcaataatactgcttggctcaacattaacattaatatttttttcttattcatagatcttcctccgtattttttataactaagaaaaatatatcaattatcagctatctttttggttatcagacttattcagtacactttttgaccaaatcagttatcaaaataattggaatttgattctaactaaaaaagagcttttcagctccttttaattttggttaagaattttatccttaaaatattcaaaatatgtactcttacctgtaataatagttgcgttgccttccatcccatatttcaaatttttcttggacttggccttacagattacttcatagacattatttccgcgtagattaatgggatatactccaatttctttcacttttcctactaatctatccattgttccactagcattagctacctgaaaatacagtgtttggcctttttttattgccccaattttattacctgggaaataagtaactacattgaccgttcttttagccttaatcatcggaaacaagtgaactgtattctcctgtttatcatcaagatgaactagccatttttctctatttcttctaacaatttgtccttcatgatagtttctattggcaatattaagtgtattttgtggttctacaattccggtagatgtaactgtactttgtctagttgcaaagaaagaaccgactattaagatcagaactaaaattgccataggaataataatcatagttgaaaaattcttgaatttataggaatagtattcggtactctcatagtctttattattcataacgttgctcctaattctcaactaagttatagtaaaagccatgtttctgcattaatttctcatgacttccttgctcaacaatttgaccatgatctacaaccacaatattgttagtcctttgtgcaattgctaaacgatgagcaataaaaataatcgttttatcttttaatttcattaaattatctactacttttttctctgtaatcgtatcaagcccgctagtggcttcatcaaaaattaaaattttagccggtgacaataatgcacgtgcaatagttagcctttgcttttgcccaccggataaaatcttggcattttcatccatcttggtttcaaactgcagtggtaattgttcgatttcagactcaatttctgctatctgacaggctttcaatatatctttttctgtaatatctggtcgactacctaagagcagattttctttgattgttcctgagaagatgtatggtgtttggggaacatagtttacgtatgaccgtaagacatgcttatctactttagtagaattaaatccattaaaagttaacttgcctttgcttggagagaagaaatcaactaaaagtttgaccatagtagacttacctgagccactcatccctacgattgccaacttatcattgggttcgatttttaaattaatatcttttaatacatcgactccatagccataatgatagtcaacatgatgatattcaatctcacctgctaattgcttggcatccctaatctgagcatctttctggaactcactcttaaccatgtatacttcattcaatcgattttgtgctacattagctgattgtagagttggttgaagattaataatgctctgaagtggatctacaaaatacgatagtaatgcgttgaaggtcattaattgaccaatgctcatctgcccgttcattacaaccttagcccctacccagaggataattacattgagagataactgaatgaaggtctttaaagctgactgcaaagattcagttttactgtaacgaaaagatttcttgaggtaatcgacgaattgactatcaatcttacgataacgtgtttgttcgctatttaaagctttgattgtttcaattccttgaatatcttcaattactgaagaacttaagacagcattactctccatctgatcattattcatcttttcaaatttcttagaaaagctaagaatcaacactgcataaattggcaaagacagtagagtaatcacaaatagagtggaattttgaattgccaaaactattcccatcacaattacaattgaaagatcaagaaataatgaaataactgtactggcgagtgcgtcaataattcgactagcatcagagaaccttgaggtaatttcccctgttctacgagttacgaagaattccattggtaattcaaaaatatggcgaatgtattgtaagttaagatcaatacttaatcgctgacctagaacatccaatagaaaattttgcccgtaagaaaagatagagttgaaaacatatgctatcaataaaccaatagctaggatcgacaaagtttggtatgtaccgctaggaatataagtatcaattaagccttgcaagaagtatgagctacaaatactaatgattgtcatcaaaagagcagccaaaataatattagtgactagtttcttttgtttgaacatgtatggaaatagtgaccacagattttgctttttctctttgagtggctcaaaatcatcatttgggaccataaaaagggcaattcccgtccattcttgagaaaacttttctttagacattttcgttaaaccaacgctaggatccggatcagcaatcactaaataatttttggttgccttaatcacaacataatagtggagtaattcgccttgctttaagacgtgtacgatgaaaggatattgaatgtctgcatcaggatcaaacaaggacatgtcagctttaactgcttcagtttttagattaaatgcttgtgctgttttaactaagcccagagcggtagtcccttctaaattagtgcgggctgaatgacgtaaatgggctaaaaatactctagaatgatattttttaagaatcatagctaagcatgcaactccacaatctgattcgtctacttgtggtacataaattgatttatactgtagtaacatcttttccactcctcatattaagttgaatccattatttcatgattggaaaactaaatgtaaaaaaataccaaatcggttattctcattaccgattcggtattttagttttctaactagattgagctactcaactttaatattttcaaatttatctacaagctttttaaccacggctttatacgatctagaataagttaccatctgaccattatcaaatataataatgcgttccttcgtgtcaattgcactaatgttcttaggatttaccaaagaagattgcgaaacttttgccaagaatgggttttctttatcaatctgagtaatatttgccttatactcaacttctccattctcagtaaccatatgtactttatgctgtgtagtactgtgttcaatgaaaagtatatcgccttcggccactttacatacgcgccgaccaatcttataagtaaagtcacgttgactaaacttaattctgttagataaattatcgaaggcgttacgtaacgtttcttcgatacgttgaataatcttatcagacgacatagacttactaatataatcaattgcaccgatacgacggcgatacgttaatggagcgtacttatcgtacgccgttacgaagatgatctgggcattttcgtcattcttcttgatgaattcagctaaatctacgccattcttagctttagactctcgacttaattcaatatctaagaagtagataccattcttaatatcatttgtgactatgtatcctaccgcttgagcaaaatcgttagcaacaaacgtaacagattcatttaattcagcgtaaccttcattatcatctattaagtcttgaatagatgcattgatattcttagccatctgattagctaaatctttatcgtcatcgcatacaatgattgggaacttactcatcctcttcaccatcttccgtatcaattgtcatataaaagtcgaaccagccgtcttgaattgtataagaaatagatatatcaggatatttactctcaatttccttaatattagctaatccaagccctttatggtctttcttagtagtaaagccacgttgttgaatttgactagttgagatatttttattttggattttatttctgatttcgaactcaaattcatctgggtcatcagaatagaccattatttggacttcagcacttcgaatatcatgcttttcggcaatcaatgctttactttcctcaattgcattatcgaaagtaatgccaataatacgtactagatcgagttcatctacatggtctggtaaattacggatattatttcgacattcaaaattatatggtatatccaaattatacaattctgttatctttggaataataatgctcttaattgatttaacgtaaatgtgatttaggtctttatatttaagtaaggctttagaatttaggttagtttcagtatatttatctagtttctgaattacttcttgaacgttaccttcttgcgcacttacctttaaagaattaagaatatttttgtaatcatgtctgaaggcgcgaagatcatcttcacttttttcaagataagaagcatattcttcaagctgatgctgctgttgctttaatttttcttgatcctttttatttaaaagtttttcttgtaccatcgtcatttcatgatatataaatatagcaaaaatagtttggataagaatatagagagaaaagaacaaagttaatggtgtaaaagatttgctttgaatatatatgatagagatgctcaccgtagaaacataggtataagctaatatgcctacgaaaattttattattttggtttgctagataattatatatttttccattacctagttttattgcaactatcatcattagtattagtaagaaacgtagtgataattggcctatcaaagtaaatgacataacctgagtgatcatatcagacacaatatcaactaataaatctaatgtgcatactaatattattgaaccaaatagtatttctaatgtattattttttctcaaatataatacaaaaagcaaagtttcaagtatatttgtgaagattacgccaatattacctatagacaataacaaccctaaaaaaatattagcaatacacaaaaatagaatctgtctctttttagatcttactcttgatattttaaaaaaacaccatacatctgctaaactagaaaaaacattaagaaaaagaaataagactatcttttccatatattattccaaagttttttactcaagaaattaaaaccaacatgtgccgtgcttccaccaacaaccttagtcaattcttcttccttcaaaacagtctttttaacattttgcttcttcatgatatttcatcctttcatgattttatactcaacttgtttacacctttaatatatcatgtacttttaagtaaattaaaaaagataccaattcagtcatactttcgtaccgatccggtttcatatttcttcaaacgtaaacaactgacaattaattttcttagctaattcctgacagctatccgtaaagccagatttggaaaatagataataatgcttaagtggatacttgaagatttcactatttgtaatcaatttttctaacacactacgagagatcggttcattcttccatttacattcgccgaaatatccatcacgttcatcgtcagagaatcctacaatatctaactcaacttgttgatgtgttctcttatcggttccccaccaattgcccaagtggataaacggattaggaacaattttttcattcatatcctgagaccacatgaagtcttgactgtatttttcaaactcaggtcccatgaaatcagatagacccttttgtacttttacccaagcaagatcagttaagccacgctcaattagatcggtttgcttgccaacaaaggtataccagaagcggaacatcccgtcacagatacgataaacgatatttttgcttttactcttcttttgctcagtaaccggtaactttttctcaacaatacctaaatctatcaaattattcaggtacgtggttagcggaccagtttgtaagtgggcggattgcgcaattttactatgcttagaagcacctgaagctatcgcattgataatcgaattatagttagttggatcgcgtaattcctgttgtaacaagttattaggctcatcaaataagcgacctgatttactcaaaaagtttttcttaatattatccgcaactgacatgctgtctgacatataactcaaatattggggtacaccgccacaaaccgtattgatgataaaagcgtcctctttactgagttttggtaacatttcatgtgcttctgataatttaaatggttcaagctttaaggctaaagtgcgacgaccatatagtggactttggtagcctaagacttgtcgttccataaatgacatcgatgaaccacataaaatcaaaaataggttagtttctttgaattcatgatcaatgtaggattgcaacattgaactaattgtagggtaagccttagccaaataaggaaattcgtcaataactaaaattacacgttgtttttgagctaggtgtgtaatttctttaaagcattcctcaaaatttgcaaatttttcttttccaccctgatctgtatttttaaaaatactaattgcatcagaaaaacgttttagattatcttccgcattttcttcaagtgctacataataaattgactttttatcttttaaaaactcattgatcagtgaagtctttccaattcttcttcgaccatagatcactgtaaattgaaaatcattttcttgatacgcctgattcaattgctctaattcttgatgtctacctacaaacatagcgcactccttttcactacatcgtaatatactacattatattatactataacacgatatagtataacgtaatgtacgtgtattctatttttgtaataaaaatggccgttacttagagaaatagcgaagatcattaaattttaacatgctataataacaatagaacaagaataaaaagttttagcgtgcgcgttgaggtagctcctcaacttagtcattaacgtgtggctctgctttggcaaagcttttttgttatgttaataccctacaaaaaagaccgtgcatccctgcacggtcttttcatcttatcacatctattttctaacgtattcgccgttcttgtacttaaattcaatcttcttgttaggcaattgaaccgtaattctgcgatatacaggaccgaagccgtgcttttcaagcttaactttcacgctaccgtccttgtttaccttaaccttgtacaagttgtattcgcccttttggtacttaaagtcagttccgttatcttgatagtgaacgtacttaccctttttaccaaatagtctaaaggtcatactctcgtctggttcaccagagatgtggctaacttctttaccccatggcaagatagtgttcttcttgataaacagtggcaacttgccaattggtgcatcaaccaaaatcgtggtctttccagcatgttcaacaccattccagaaatcaatccattttccttttggcaaatatacggcacgcttggtttgaccttcttgaacaactggggctgccaaaatgtcctcgcctaccatatattcatcattcaagttatacacctgtggatcattttcataattaaggacaagtggacgcataattggcaaacctgtcttagtttcacgatagaattcatcgtaaagatatggaatgaaacggtaacgcagcttcaagtacttacggtaaattgacaaggttggttcgccaaatatccatggttcttgtgagcgagttcctagagccgcatggtttctgtacaatggactaaacaatgcgccttcgatccaacgagtcaacaattcaggtgttgtgtcagcaccaaagccaccgatatcagtaccggcaaagctgaatccactcatacctaagttacataattgtggaatcatcatttggacatgtgtccataaactttggttgtcaccagtccaaactgtggaaaacttttgcgttcctgcatatgctgcacgcgtaatgacaaatgggcgttttccactgaatttcttcaaaccttcataagttgccttagccatgttatgaccatagacattgtgcatcttcttatgagttgaagcttcttcttcattatggaagacgatattttgtggaatttcacccttgaaggatgcaggttcattcatatcgtcccagatacctgaaacaccaaggtcaactaagtacttgcagttcttagcccaccacttacgtacttctttgcggccaaagtctgggaagactgaatcgccaggccaaacttggtttacataaacagtgccatctggagcctttacgaagtagcccttttcgataccttccttgtagatcttatagtcatcatctttcttaacgccagggtcaataatcgtgattattctgaagcccaatttacgcatcttagctacgaatttctctggtgactcatagttatcttttctccaggtaaatactctgtagccgcgcatataatcgatatccaggtgtaaaacgtcacatggtaagtcatacttacgcaagttttcagcaatcttctcaacttgcttttgactgacactgtagccccaacgtgattgttgatagcccaaagtccacttttgtggcattggtacacgaccagttaaataagtgtagttagtaataacttccttgagtgagtcaccaccgatgatgtagtagtcaatattgccatcaaccgctgagtagtagtaatagtcattactttccttacctaagtcgatgtggttgcgataagtattgtcaaaaaagataccgtaaggatgaccattttttaatcctaataaaattggaatcgacttatacaaacgggtaaagctctctacttgcggatcaggattgtcagtattccaattatcataagcatagtggcgtttgttcaaatagccggttttatcacccaagccataaaattcttcgtcatctgctagtgacttgaccacttcataataatcggcgtcatgctttcccagtaatttatccacatcatggccttcagattcagccagcttcaaatgttcctcatccatctgtcggtcaattggggttcttttcccccgataatctacgaccaatggattgccttgttcatcaaagacgtcaattttttcatcatcataagcttttactatcaacttagccgtagctatttcaatatgatcgcctttatttttaactgtaaaatcagttttaatttctttatcgccttcgatagcataagaattgctagcattacctcgatcttgaaagaatcgcataatttccggtgttaacacggtcaaaatcattggtccattctcatagtttaaggtaattttttgtccatctttagtaaaatcagtaagttgattaatcataatttacctctaaaaaatcaaaagttatgtattcgctttcaattttaacacaataagctaatcaattgggtcataccagaaaaaacaccttcagaaatttttgtatttaaatacaaaaaaactgccttacggcagttttatttaatttattccattggaaaaatcttatctggattcaaaacataatttggatcaaaaacatgcttgatctttctcaaaagttcagtgtaatcatgaccatagaaatcctcaaaccaatctttgcaggcataaccaataccatgctcgccagacatatttccatccaaagctttagctgtcttataaagttcggtaatcacataatgactcttttgctcaaactcttcgtcactcattgcatctgagcaaagataaatatgtaaattaccatcgccggcatgaccaaagttaggaattcgcataccaacctcttgttccaattcatcaactctatgcaaaacatcaggaatatgattaattggcacacaaatatcaacttcatccatctttggcgtagacttttgaatagccaaaagcaatgcttcccgacaagtccaaatcttctttgcttcctctgaattagcatctaaaattaccgcatcagctgctttaaacttcttcgttgctgcaagggcaagctttaattccgcatccaattcctctttagttaaagaatcaagccctagaataatgaagccatcgccatttgcaatcgggaatttttcatcgtaatacttttcccagagactaatgacttttctacccataaattcaacggttgttggcactacaccagaagccaaaattgctggtactgatttaattgctttatccaaattaggaaacggaataattgcattgatcgattgtttaggacgtggatataaacgcatggtaacttcagttactacacctaaagtcccttctgagccaatgatcaggtcttttaacgaataacctgatgaggacttaactgccttagcgccaaatttgtaaagtttaccatcagttaaaacaaccttcaattcgcggatatgttctcgagtaacgccatatttaattgctttcaacccaccggcgttagtatccacattaccaccaattgtagcccaatgcattgctggagctggcatataagtaaatggtttattggctaaatattcttcaatatctttcaaccgaatacctgcttgcacagtcatcgttagactttctggctcgtattccaaaaccttattcattttcaccatatccagtgaaatgccaccttcaacggttaaattgccacccattagaccagtcgaattaccacgcggaacgataggaatatgatgatcgcttgcatatttaacaacgttttcgacttcttcattagtttcaggttgaattaccaagtaaggcattgctctaaccgtcttaaattggtcatgatcccaatgaacagttggcttagtaatgaatcgctctggatctgagataaatttactcaaattatctatatctgttgcagttaattttttaaagtccatctttgacacttctttccaaattgaaacatcctatattaactaatgtatccgcttttgtaagcggtgtcaaaaacaaaaactgaagatttttttatctaaaaaagcaaatttccatactacctcactttaaaatgcgatagtatcgactttcatttaaataactattacacaaaatatgaaaataaaaaaactgccttacgacagtttctagttaaataaatccgacatcttagttggaatattattgtttttcacaaaatactttttaaaagtaggtaaatctgcattttcttttttcacatacatatcatgtaaagcccaaaatgcagtgattaacaaattaacgcccaagacaattaacataccgattaaaatatatactaagtaaagcattgatctatcccccgctatatcgtcacttgacccagagtcgcatcttcaatgaagtatctgacgaaagcttgattgaagctcatgccctggccgttgtaaacatgccactcttcgcggttggcacctacagttctaatgattgaaattactgtgcaaattaccaaatatgcgattagcacgttaaaaattattttcattaccagcatgtctacacttcctctctgcactactcaactaatacactaatatttattagtcaatttgtcaacatcttttagtatttacttttttctccccaggtataaaaagccatagatagctggtccgatcactaccgccccagctatagaaactataatcactgcaataaagcgaggcatagcaaaaaattccgagctaaatttcatacagacccaggccccaaagaaaaaaatcgcccagccaattaaaattgaaattagcatatttaaacctgaaaatttaggtttagagtttttattgttcatcaagttttctctttcataaaaatattgtgccacaaattgaaggtcaataaacaaaagtgacagattcggtcgttttttagacttatttggtaaaaaataagggagattaagtaaaatatggcgcttaatctcccttttgaatcaataattatttgcccataagacctgaaaaagccattcctaaggcagcaccaccacatgcacctgctttagctgatacgggacgagcataactagtaattgcataatgaaacttcatcacatcatgtgacaatttaccctgccagcttaatggatcaagaccaactcgaattaagttgcagacataattagctgattcaccattttctaactcatgctttgcatcaagtaggatttttctttcttctggcttagtatcttcatttactagtaggtcagtaatattacttaatagccattgttttaaatcatctttattttcttgatacatttttatccctctttttcgactttttcattaatatcaggatgcatccctacaaccattttagaatctttcatgttcttcatcgattcatttattttaataaaaaactctgcaagtagcagagctttttacctcattgcagagttacttatacatatacttagcacatgcttttttagaatccataccattacgaatcttcaaagctaattcaatcgatacatccgcaataattgattgtgggtcaatcacattgtaaggatgatctggtgccttttcctgagctaacgacaattctgtacatcccagcaagattacgttgcagccataatcatcatgcattttttgcaagatctggtggtacaatttaccatcaaccattcccttttctttaatatcggaataaatgagcttattaaccatcggttgaatttccggaccacctaattctgcctcacggtgaaccgcatgaatttcatccacatacaaatgatcatagattgacccttcagtcgcaatcaagccaattttcttttcttgtgggtatttttcaataaattgatgcactgctattctcatcatgtgtaaaaatggaatatcagtcaatgcagccaaatcatcataaaaatagtgagcggtattgcatggcatcacatagaagtctggtcccaatttggcttggcccagaacatcgtcacgtaaatcatagaaaaagtttggtttagtatgatctttaatataagccgttctatcaggaatttgtgcatcattaaccaaaatataatttaaataatcttggtccttagctatttttacacggtgattaattaaacgaacgtagctttctgtggcaatagttcccatgccgccaataatactaaagaagtgtttcactattttcacttactttctaaagtgttcttcttgaccttccaactcattaattacctgctgtgcaaccacaatatcagatggatatggggtatttactccgcgaattttttggaaagcgtcagcccccttaccacagattagcacaacatcatctggcgtagccatggcaatcgcatcatgaatggccttcttacgatctaactcaatagtaacgtcgcacttagagtgatctattcctgaatcaatttcttcggcaatactctttggatcttcaaagcctggatcgtctgtagttaaaaatgctttatctgcgtatgcagtcaaactttcactaaaaccgggacgacgtgacacgcctttatcaccaggagctccaacaacaacaataattttaggatcgttgaattcgttacgcataaatctcattaaagccatcattgaggccttattatgagcgtagtcaactacaaccatgccgtgcttctttgttctctcggttcgcatccggcctggaatagtaacatcgcgaatacccttcgcacattgatcatggttaagtccagccaagcctgctccaataattgcggcagtaccatttgactcgttgaaatcacccagcatctttaaagtataatcaccattaattggtaatttacgtgccttatcactagcacaaactaaattgaaccgagtttctttcatatctaattgttcagaagagaatctgaaatcaattggctgcttcaagtctggattttcaaaattatcgcgggcaaacaaataaatactatcggggttggtagtagttgttgcggcagcgtagacttcatcaaagtgtgcagtttcagcgttgataatacatttacgtgagttaacaagcaattgtaatttgcagtgcaaataatctgcaaaattagggtgttcgttaggaccaatatggtctggactaatattcaggaaaaagcctaaatcataagttaaaccgaagacacgatttttcttatatgcttgactagaaacttccattaccaagtgagtcatgccattatcaacagccgttctcatgtctcggaataagttcaaactctctggtgtggtcaagcttgacttaaagctatcttcaggcttaggaccgaccacatcattaactgaagaaatcagagctgtcttaccaccatttgcttgatcaagcatccctttcaaaaagtatgctgatgtagtctttccctttgtaccagtgaaagctacaacaaacaagtcatcttgtggaaaacggaagaaagcagctgacaaaagagccattgccttagaaacatcgcgcacaattaaagcgtgcattccttttccttctggatatggttgttcagctacataacaaatggccccattgtctttagccattgacaaataagttggtctaaagcctgctcccttgcagaagaacaatgtattagtttgaatatcgcgtgagtcataagacacatagtccattttagtagctactgtatcttgcactgcgcttgacttgagcaagtgatgctcttttaagattaatatacaggtatttaaggaaatactcattagcttgtctcctcgttgtatttaaaacatttcagtcaaaattataacacagctagtgtgttggtgacgctttcttcggatcaagtggcaaacgaataataaaactagtccacttttcgtttgattcacagcgaattgtaccatggtgtaaatcaaccacacctttggtgatagataatcccagaccagttccgcctgtcttagtatttcgcgaagtttctacccggtaaaaacgctcaaagattttatttaatgatttcttcggaattggtgccccattattttcaacgcgcaactctacttcacgtttgttgactaaattggctaccaatttaattttagttgcccctgtaccatacttgaaagcattagaaatcaaattattgtaaacgcggaccagcttttccgcatcagccttaatcgttagattctttggccgcgcttcaatctctatttcaatgccatttttttctgcttctaattcaaatccggccgctacctgctccaacattgaataaatatgcaaatcattcagatttaacttagtattggtcgactttaaagtagtatattcaaacagatcgttagccagtgctttcatttgttctgccttagtataggcaatattgacatactttttctgatcttctggcgaagtcactcctgcttttaacaaaccaagataaccaataattgatgttagcggcgttctgatatcgtgcgaaacattagtgatcaattcatccttagattgctcaattgcccgttcttcattaatcgaatttacagtactatcaaccaacgaattaatcgaatccactactcgttgcaattctggtcgtacccgaaaattaatccgatgatcaaaatgaccattagcaatatagtgaagttccaaaataatgtgacgtagctgcatttggtgatagcgtcgaatcaagcgccagtacaaaacaaccaagtcgcccactcccattaagacgatgaatacgttttgccaggaccagagatgatagccacctgcaaaagtgatcgtcttttttagaaagtagattccgttgaccaggctttcatcctgcaaaatagctaagtgaatcagaatgataattgataaatttaataaaagcagaaggacgaccgttacgaccccttctgcaaacaattcgctcttttcggcgccagttagcttgacgcgttcttttttcatcttatgcctcgaccttgtaacctacgccccaaacagtttggatgacatcctcaccatcagtggctttttgaattttatcacgaaggtgtgacacgtgtaccatgacagttttagctgaaacaattgattcttgttgccaaacacgttcaaagatttcatcagctgaaaaaacacggttagggtgactagcaagtaagtataagataccgaattctaaggcagttaattggatagtcttaccatcaatagtcttaacttcatgtgaatcacggttaattaccaatggtcctacttccaaaatatctggtttttcattcttaacttgcttttgacttcttctcaaaagtgaacgtacacgagccattacttcaagtggattgaatggcttagaaacatagtcatcggcaccagtgattaatccttgaatcttgtccatatcaccggttttagcagaaacaataataattggaatatcggagtcttttctaacttccttaattacatcgattcctgacatatttggcatcatcacatccaaaatcatcaaaacgatatctggcgtagtggtcaatttagtaattgcttccttaccactatatgccgcaacaggttcatatccttcatttttaaggtagatacttaatagttctacgatttctttgtcatcatcaacaactaaaattttcacgaggaatgttcccccttcttgtttattattctctgtttttctatctacagtttagcagatatcatatagaatattttacacattttagaaaaatatactgctttcattatcctttttaaacaaaagctaaaaaaatacacgtttctccatcatgaaaaacgtgtattcattctatttactttaccttatcatcatgcaatttagtttcgacataaacgcagacgataaataacagctgccttgtttaacgcttattgaatttccttcttgccagtgtagagttcatagtagtaacccttttgcttgattaattcatcgtggttaccatgttcaataatatgaccatgatcaagtaccaagattaaatctgagttaacaatcgttgacagacggtgagcaataacaaaactagttctaccaataagcaagttgtccatcccggcttgaaccattttttcagttcgagtatcaatacttgaggtagcttcatcaagaatcattactggctcatcagcaatcattgcccgcgcaattgacaacagctgtatttgcccttgtgaaaggtcgccgccatcaccatcaatcacagtttcataaccgtgatcaaggtcatggataaattcatctgcgtgtgataacttggctgcttgataaacatcgtcatcactggcatctggattaccaaagcggatattgtccataattgtgccagtaaagaggtgggtttcctgtaaaacaattgaaagtgattttctcaaatcatcttttttaatgtttttaattggaataccgtcataagtaatcgttcctgaatcaatatcgtagaaacggttaagcatgttagagatggttgtcttacctgcaccggtttcaccaactaaagctaccttcattcccggtttggcattaatggaaatgtcatgcaagatttgatgatctggtacgtagctaaagttaacatgatcaaaaataatatgaccacgaacttgaaccttcttggttgagccatctttttgtggtacattccagtaccacttactgccgacttcatcgtttttcttagaaagagtaactgtaccttggtcagcttctgacttttgatcttccaagttgaaaattctttctgcaccagctaaagccattacaatagagtttaattgttgcgaaatttgggcaattggcatactgaattgcttagataactgcaagaatgaaccaatggcaccaagtgaaagcggagcccaactattaattgcggcagcaccaccaacaaaggcgatcaaaacgtaaagcaagttacccatgttacccataattgggaataaaattgtagcgtaagtgttagccttacctgaggcttgacgcaactcatcattatatttgtcaaagccttccttagattgtggctcatggctgaagaccttgatgaccttcaaaccattaagcatttcttcattataaccattgatttggcccagcttcttttgttggacttggaagaagtgacttgatctaaccgttaagtagcgcacaattccaaatgataaagcaaaaataatgaaggagaacaccgtcaattgccaactaagtgaaaacatagcaactactacaaataataaactcaaagctgagttagtaaattgtggaattgactgtgaaatcatctgcatcaaggtatcaatatcgttagtataacgcgacatgatatcaccaaattcattttggtcaaagtatgaaattggcaagctttccatgtgaacaaacatttcgttacgtacacgatattgcactttttgagctaaaacacccatcagcatgttaaaaaggtaattagacaaaaaaccaatcgcatagatcccaaacattaccgcaattgcagtagctagaggaacatagttaggaactttttctttagttaaaggcacaatataattattgatcaaacgttcaatgaataacgagccaataacgttgctggcagctgctagtacaatagtgatcatggaaacgattagcatccatggactcgtactattaaccagtttcaataggcgcaataatattttggttctgctaccctttgtttgatttttacttttttccattgcttgatccaaattgctcacctactttccttgttcttcctggaatttagcgattgaactataaagttcgttagtcttcatcaattcatcgtgggttccaatagcttgaatttgaccatgatccatgacgataatccgatcagcatccttaattgaaacaattctttgtgaaataatgattttagtagtttctggcatatctttagccaaagacgttctaatttgtcgttcagtactggtatcaacagctgaggtggagtcatctaagatcaagatcttcggattcttaagcaaggctctggcaatagtaattctttgcttttgcccaccagaaacgttgttaccgccttgttccaccattgtgtcataaccatctggcatttcacgaataaaaccatcagcatgggcgattttagcagcggcaacaacttgttcatcggttgcattttcgttaccccacttgaggttatccttaattgttcctgtgaacagcaaattcttttgtaaaaccatcgcaacgttatcacgcaaagtcttcaagtcatatgacttaacgttgtgtcctgcaacccgaacggcaccagaagtaacatcataaagacgcggaatcattgaaaccaaggttgacttcgatgaacccgtttcaccaataatcccgattgtttcacctggcctaatgtgcaaattgatatcttttaaagcatcagccttgtccgcaggttcgtacttaaaactaacgtgatcaaagataatttcaccattggtcaaacgtttcaatggcttcttaggatcttcaattgttggttcttccgtaatcactgaagcaatacgacgaccactggcgcctgaaataaccaattgcgtagtaatcatggctaaaatgtttaaactaaacaaaactgagtttgaataagtaaacattgaaattaattgaccagtttgtaaactaccgccaaccacttcttttgcaccgaaccagcagattgacagcgttgaaatattcaaaacagctgcaactactaatgcgttcaaagacataatcttttgtgcagtcgcaaataacttgtaaataaaacctgatgacttcttgaattctttaatctgcggttgttcttggacgtaagtcttaacttcacgaataccacgtacgttttcacgcacaacctggttcattcggtcataccctctaaaaatcttaggaaagtatggataagctgttttaataatcaaacccaaagcaattgcaaaaactggtcctaaaactgcaaagattaatgataaacgcggactaataataattgacataataattgaaacgatgaacatcattggtgctctaaccgcaattctgatgatcatttgatatgccatttgcacgttgttaacgtcagtagtcaaacgtgtaactaaactggcacttgaaaagtgatcaatattttcaaaagaatagtcctgcatatggtagaacatgtcttggcgcaagtttgcggcaaaaccagcagctgcatgagctgagacataactcgcactagcgcctaaaattagcgaaataacggttaacactaatagcaatagccccattttactaatataggacatatccccttcataattccgttatcaatcaaaattccgaccaaatatggaatcagcatttcaatgataacttcaccaataacaaacattggtgagagcaaagacaattttttatattgcctaattgatttgctcaatgttttgatcatagagacccacccttctattcttttattcaatctcgcaaataaaaagataaatggatcatctcccaatgtcattaagttaagacattgacaaattgaatctaatctctgtagaaccgaatcattatgatttggttctttttttgcataaaataaaggcgaaaagaacctaccttttcgccctctgattaaattattaaaccttcaaaattattgccagaaagctggtgttaattatgaaagcccttcacagaaatattttagatcgtcttgatcaaattatcaatgatactggaaagcatattcatgattttatcgatgatcctcatgccttcactaggaagcggtttttagatgcagctacagtcattaaaactactattaatatgcaaggaaaagatttgaccagtgagttgtttagagcttttggccaaaaagctattaaaaataacgataaagtagtcagtacttccgcttatgtccaacgcaaaggtcagctttcacccgcatgttttaagcatattctaactgtatttaatcagaatttatttaatatccagttatttgatcataaatatcgtatatttgccattgatgggtctgattttaatcaaatctggaatcctaaatcagagaatatcgttggaaatctcaatcataaaggaaagccatattgccaaattcatgttaatgcactctatgacctgttaaataatacttatcaagactgcatctttcagcctaagtcaaagatggatgaacgtaaagccgccattcaaatgcttaaaaagctaaattgcggaccatatatagttactatggatcgaggttataccggctttaacatgattgaaaattgtaatcgcctgcctaactgttattatgtcatacgtactaaaacgggatatggcgcatttaaggaagtagctgagttgcctaatcaagagtgtgataaggatatagcttgctgggtgactacctctaattattattatgaaacccataaggctacagaaaacgttcatttggttaaccatcattaccgtcaatatataaaatatcggtctaaaaataccaaagatggcagctgggactttggagagttatgtacaataaaatttcgtgcctgtaaatttagaattaatgatcctaaatcaggcaaagaagaatgggaagttgttctaactaatctaaatagagccgattatcccttaaaaaggatcaaagagatctaccatttgcgctggggcattgaaacttcattcaaaaagttgaaatatgctttaggtagcgtacagtttcattccaagcaggatagatttattgaaatggagatctatgcccacatgattatgtttaacgcagtcagtcaaattgatgctcaagcatatgtaccacaaaaaaactgcaagtatcaatatgcgatcaatttcaaacagtcatgttttgtcatccaggctatgtatataatttcttcttcaactgaaatctttaaaaagattcttattcaaattagtcattacacaattccgatcagaccaggacgaaaagacaaaagaaatctcaaacccaaatcagctgtatattatttatatcgtgtagcctaatttctaaacaaaatttgggtttatttggcatgaaaaaagatcattcaaatgcgataaatcacaaatgaatgatcttaaaagtccaagtcgataatttgtcaatgtcttaacttaatgacattggatcatctccatttatcttttttatctatattaagtttaagtatgtgcttatttttacggaaattcaattaacatgcttgcaaaacaggtaaattatttatgttgttgtggccttggtgcaaatgcggaaccaacaatattgtagtgctttctgaataaataacgtacaccataggcagccgccgcgataacgatgtcagctactgctggtaaaactgggttgattacgcgcaatgctgggatttgcaaaatccacatccagacaaacaaaacaactgctatagccaacattcttaagatcagcttaaccaatgaaggacgtttaccttgctgaggcattagccaatcattgtatttaaccatgaagatccccattaaaatacctacactggcaattgtcagaatccccatttgtgaattatacggttggttcttagtttggaataatgcaaggataccacataaaccaacaaaaattgctaaataaagcaatgcgccatcaaccatcaactgccaagttggtgtagccactggctttttcttaggatgaagcatttgttcagccttaattgctggtgaagccaggtaaagcccattggctggttgcccatgacgttgggcaataataatttcactgagcaagccattagtcatcgcaactgcatcagcacgtgacattgaaccttgtttttgcagttctttttctagacgaaaaacatagtcactgttcttgttactcaacttttcacgcaaagcttttggatcttcctgcttaattttttcatcctgagtatcaagctcagcttgcttctttaatttagcttgtttttcagtgttaatttttgtttgatcttgttctctctttgtctcttcagccattcttactcctagacgttaaatctaaattcaataatgtcaccgtcttgaacttcgtaatctttaccttcaagacgcagcttaccagcttctttaaccttttgcatagtttcaagcttgtctaaatcatcaaatgaaacaacttcagctcgaataaaaccacgctcaaagtctgagtgaataacaccagcaacttgtggagctttcatccctttgtggaaagtccaggcacgggtttcaggaccaccggcagtaaagaaagttctaaggcctaagatatgatatgcagcacgaatcaaacgatccaagcctgattcttctacgccttccatttcaaggaattctttcttttcatcatcagccataccggcgatttcttcttcagttgcagcagaaatacctaagcattctgcaccttcgctttcggcatgcttcttaacaatttggtaatacttgtcgctttctggatcagccattgagtcttcagcaatgttagcaacgtagataactggcttggaagttaacaagaacaagcccttaacaatcttttgttcatcttcgttgaagtcgattgaacgagcagcattaccttcttcaagtactggctgcaatttattcaaaacagccatttcagccttggcttccttatcgccttgttgagcaaccttctttaccttattgattctgcggttaacagcatcgaggtccgcaatagcaagttccaagttaatagtattaatatcttcttctggatcaaccttaccagtaactgaggtaatattgtcatcatcaaaggcacgaacaacgtgaacgatggcatcagtttgacggatgttttcaaggaacttgttaccaagaccttcaccttttgaagcacccttaaccaatccagcaatatcggtaaattcaaaagttgtgtgcacaatcttcttagcaggaatcaattcttgaattcttgccaaacgcttgtcaggaacttcaaccattccgacatttggttcaatggtggcaaatggatagttagccatttcggcaccagccttagtaatcgcattaaacaaagttgacttaccaacgtttggtaaaccaacaataccagcagttaatgacatttgttgtcctctttttctaaaatcaattttttatttttacttacttgtctattttatccaaaatttggccgagcgatacgatcttttggcacatattgctctttttttgcattaaccggatcattcgccttagttaatagcttttttagcttccggttaaactcgctgcgcggcatcatgactatgtgcccacaacccatacattttaatttgatatcagcacccatgcgcaaaatttcccaatcattagtctgacaagcatgaggctttttcatttgaactgtatcagccaaattataaacaatttctttagccatctaaatcaacacctaacaaatcaagaatccggttcaattcttcagtcgaagcaaaatcaatcgataaatgacccttacctttttgtgtttctgaaatattgacgctagagccaaacttattagccaattggctttcgctagcccggataaaggccgatttcttgacggtctttttgctgcgaggttttttagcgttcaattcactgactaccgcttcaaccttacgcaccggcatcccttccttgactactcgcttagccagcgcatcaatcttttccttatctttcaaacttaaaagcgttctagcttgtcccatcgacagttcaccatgttggagtaaacgcttagtcttgctaggtaaagtgagcaaacgcaaataattagcaatatatggtcgcgacttacccatccgcttcgaaacttcttcttgcgttaagccaagattcttctgcagcatttcataagcttgcgcctcttcaagtggagttaaatcttcacgctgcaagttttctagaactgccacttccatcatttggctttcgttaaacttgcgaataattgctggaatagtcttcttcttagccaatttagaagcacggaaacgacgctcaccagcaatgatctcatatccattaactgattcgcgcacgataattggctggaaaacaccattttccttaatagaatccgacagttcttttaagctcttatcatcaaatctttttctaggctgataaggattcggccgaatatcgcccaaatcgagttcttggacttcttctgcctcttgaacttgaggctcatcctcaaataaggcttcaagaccacgacctaggccgcccttttttcttggctctttacttcttgagtctcttgtcatgagcttttaacacctcttttgctaaatcatcatataccttggcaccacgagattttggtgcatattctgtaattggctgaccataacttggggcctcagctaacttagtaattcgaggaatgatggtcttataaactttcttgctaaagtaggactgcacttctttaaccacttcagcacccaagttagttctggcatcaagcattgttaacaaaacgccttctacgccaagatctttattaaaatgcttttggactaaacgaattgtgttcaaaagttggctaagtccttccatagcataatattcactctgaactggaatcaaaattgaatcagatgcagtaaaagcattaattgaaagttgccctaatgatggcggacagtcaataaaaacaaaatcgtattgatcgctaattgcatctaaagctgactttaagcgtgtctcccgagccatcattgaaattaattccgtttcagcaccggacaagttgattgtggctggaaccatatctagctttggcgttgaagtatggtgaatagtatcttgaataggaatttcgtcaatcaaaacattgtaaatgtcctggtcaatctctgatttttcaattcctaaaccagaggtggcgttaccttgtggatcaatatccacaattaaaacgcgataaccacggtcggcaattgaggctgctaaattaatggtcgtagtggttttacctacgccacctttttggtttgcaaccgaaattacatttaccatattgttcatccttccctattacttccttttcaattcaattgtgatcttataatcatccggatctttattttctgttactttgactttaattcctgagtcttcggctaacttaaccgccttcttaatggtgttaatttgtacctttaagtctttaggaactcggctaacgacccgcttagcttcttttttagccttaggcttagggttaaagtaagcatccacatctttcacaatctcttcagtttgtttaacgtttaagccttttgcttcaatttctgtcaaaacgcgatcttgatctgcattacttaagccgatcattgcacgaccatgacgagcggtaattttgccagcaatcaaagcttgctgcacattatcatccagcttcaataagcgcaatttgttagccacataagattgagacttacccatatttttagccaaagcagtttgagtcaaatcattcaattccattaaattagtataagcttttgcctcatcaattggatttaagtcttcacgctgtaagttctcaatcaaggctaatgaagcagcttgatcatcactcatatttttgacgatcgcaggaatagtctgccagcccaagcttttagctgcacgataacgtctttcacctgcaataatctcatattgctcgtcatcgccatcttcacgaactacgataggttggagcaagccatccttatcaagtgtttcagctaattctttaattgaatcatcagaaaattcacgccgtggttgatagcggttaggaaaaatcttgctcaattcaagatcttgaacctgtttattcttaggaatttcatcatcatgatgcataaaagaaaataatgacataatatacccctttctgtttaatgaatcggtttgcgccgcggggtgcctgcttgacgtggatactttttaggtgttgctttgactttttgaactaagattagagttcgttcttcttcgctctcaggtagagtcaattcttcttccttaaccagcttaccgcccagcaattcaagagctttttgaccatcatccaattcatcttcggcttttggtcccttgagggcaataaagtaaccatcttttttcaccaaaggcaagcaatattcactcaaaacactcatccgcgcaaccgcacgagcagtaacgagatcgaacttttctcgataaagcttattttgaccaacgtcttcagcgcggccatgaactaattcgacgtctttcaagtctaacttagtaattaagttctttaaaaaagtcaatcgttttgccaaagaatcaacaatggtaatcttcaattctggctgcaaaatcttgagcggaattgatggaaaaccagcaccagcaccaacatcacaaagagtagcaccatctttaaaaacatcgccaaaagtaaacagcggcgtaatactgtcataaaagtgcttaaggtaaacctcatcttcttcggtaattcgtgtcaaattgacatgctcattaacttcgatcaaataattaaaatatattttaaattgttcaatttgttggtcagttaatttaaaattgtgttttgatagttctaaaataaatttttcaggattcatttttcacccgtgaaaccgtgtttcacacctctaaatttaacgcaaaatgcattgattagtaaagatatttcatcttatcaattatgaagtatttttactcaatcgtcaaagttttgccgcccgcaaaatagggtataataaggcgcaaaggagttaaaaatatgattgttactttaattgttttagcttacttagcatataaaacatatttaggctataaaacaggctttacacgctatatcatcggtttaatctgttccgccattgtctttatggttgccattttcatgcaaaatccattcggtaattggctatacacacaatacactggagaaatgattaagactaactccactaacaacgtagaattaatgattgcacgctttgtcgctttctttattattttcttcgtgggtaaaatgatcatgaagattgtcaaaagctggattcctaacaaaaatccacatgcgactaacttaggcagtattctcgacaatgtcttgggtgctctagcctccctaattgctagttattttgttgtttacgtggtcttgtccatgttcaatgcactacaaaatccatggtttatgcagcaaacaattgattctagctttttgaggtttatcatttacaacacaccggggctttcaaacggtgtcttcaataatatctttaatattggcaaaactgtgggataaaatatatcaaaaaagatctgcttgtatcatactgagcagatctttcttgatatgttttaactaaattaatactacatttatgaaccaacattcgatatacttattagcgcaggaagttttatgagcggcggctggttttcccccggaggtgaggcctatgggctacattgatgaaagggttccagccatgtcggtttacgagagtatctccttgatgcttttgttcggtacatttttgttggctttgctgacatatattgaccaccaccaaaaataaaaaacgccgctcaaacatactttggccagttattgagtagcgtttaacgtaaaatttaacatttgaagccgccgctcttaaagcgggctgcttggagtccctaggactcctttttctttagtcattatagcatatttcactaatcaccgaaattatcatattcaatatgttcatcattataaacaaagattgtaccaattcgatcagggttatcatgccaaccctttagtggcttgccagcaaagaataatcgtttgcattcaatttctgcttcaaccgatgttttggtaaaagtagtcacaccagctaaatcagtctttacaggatacccggttctaggatcaatcaaatggtgatactttttaccgttaactactaagtagcgctcatatgtcccactagtaacggctgagcattcaggcaccataactgacgtaatattgtcgcctcgcggctgtttaggatcttgcacaccaattgaccactggccactaattcttttaggcgaatcaccaactaacaagatattaccgcccagattaataattcctgcttcaacgccatatgcacgccacaagtcacgaattcggtcggcaatccaacccttagcaattccacctaggtccagctccatgcccttcattttaagaaaaacagattggtcactgtcatttaaaaccaccttaaatgggtcagttaacagcattctatctttaatttcttcatctttaggaacatgtgcgcctttaaaaccgatatgccaaagtttaacaactggtccaattagagcattgaagccaaaattctcgcggctcttttctactgccaatttaaccaaaccatacacagcactagagacctgtaccggatgttctccagcagcatgattgatatccattacttcagattcatctcgattaacggtaaaaatatcttcgtaatgatcaattaaatcaaatgatttttgcaatagatcacgattttgagtaccaaaaatctgcaatgtaattgaagttcctaaagcatgatgatcaccaaccacctgctctaatgctaaatctttaatcataattatttctcttccaaatataaatcacgcaacgcctcacgtagttctgtcgttacgccaattttttcttgtaaaaagttatcgaaactaccaaaattctgctcaatagcgattaatgaagtatccaaaaaagcatcagaaactgaacctaaaattcgcatattagcacgaaaacaaagattctcgccctcttcttgcatttttttatctcttttggcccgatagttattaagcatataatttgagtacaaatagtcctgtctaattgtttccatatctacgccaagcaaatataacaagactacagttaccaatccagttctgtcttttccttctgaacaatgataaagtacagcacctttttcagtattggccaacagctctaaaattttattcaagctatgttgagcgtgttctttcaatacatgtgacttgtaacgctcacacatcattctaaagccagcatactgatcttgacgataagttgcgaatacttgggttaagtctttcttaccgcctttggtgttgtcatcaacagaaattggaatacagaaatgctctacgccagggattttgctgtctggacaatggtcacattcagttggtgaacgcaaatcaataatcttagtcaagccataattgagcaaaaactcttgatcatatctcgttatgttgctaatcttgcccgttcttaataaccgatgcatcttgaccttacgtccctgatagccaacatatccccctaaatcacgcggattacaaactttttctaatggcaaaatatttggtttcattaatttcatctctttattaagtattttgataaaaaagccggatagtgtccctatccggtaattttactatcacgtggcaagtcacgcaaaattatttgttagcttgttcaacaaatttaataaagttagccatcatagcatctagttgcttaatgtaatcttcattggtcaaatcgccagtttctttatcaaaattgcttgcagcaacgccaattaagatttcattgcctggcaaaacattggcactcatgtctggtgaaagcaagatttcacgagcatcttcttgcgcacgactagatccttgaataccgtatgaagtaccaacaactgcagccggcttcatcttcatcacattaagaccagcatgtgaacctaaccattcaagcgcactctttaaggcagctggaattgagtgatcatattctggtgtagccaaaattacaccatccgcattcttaacatcctcgatccacttcttagtaacatcatctggctcatcagttctacagaaaggcttaagttgatcgatttctttaacttcaatatcagcttgctcaccataacgcttagcaataaattttgctaaaaaacgattgaaagaaaatggagcgtttgtaccaacaattgctaaaattttcatttaaataagccccctacttagtaagttgtgcataccaatcatcaacttcatcaaagaagtgattcaaaaacttaagtgtacctgcatcggtcaagtcgcctttatcatcaaattgttttggtgccaaacccatcataaattcgtcaccagcaaagacatgagcactaaaaccaggtgcgcccaaaatgctcttcaagcgagtttgcgaacgagacgcaccttgaggcattggtgaagttgacacaataactactggcttatcatggaatgggtgaacagaactagaaagccattcaagtgcactctttaaggcacttgaaactgagtgttgctgttctggtgaagcgatcaaaaccatatctgcatcagcaatttttttacctaaagctaatacgctagcaggagcatcaacgccttctttatacataggcaagcccttaacagtcgcaaagtcaaaatcatacttatcgcctaagtccttaataatgactttaagtaatttttcgttaaatgagttatcggcattggagcccgataaagctaataccttcataaaaaccacctttcaaaaatcctcttagttatcattatagactaatgtagcttaatttatgtcattttaattttaataacaacaagaaaaaacgccttcgataatgaaggcgccctctactgaatgaaaagcacaaatgattggtgaaatttctatgccaagttatccttaagcgaagcttcttcgtcggcagcaaacattgggttttcttgagtttcgctgagacgattgttaagcatagcatcgtggatttgagcattcaacacattgacgatttgagtttggctgaagcttgcaatctcattaacaatcaatgcagccatacctgtagtagaaatccagttagcaattacgatgtcatgaatcttttgatcatcgtaatcaacatcaggatattgttccttgaacttttcagttccaagttccatcaaagtgtcagcaatgatcttgctaccaaacttgccatcaacgaacattgctctaaacaagttaacatgagcttgagcaaaatcaatgtatgacaaatccaagtcaatcaaaggttcaccaacgtacttttgttgtaaagtatgtgttctcaagtcattagagattcttctcaaaacttgattgcgaagatcatccatgttgttaaattctagatacaaaggttgggttgagaagtgtcctgctttagcaatgccacgagcagtcaaaccttcaataccatccttgattgccatcttgtaggctgtatctaaaatcttgtctttactaatttctttttttcttgccattttaatgcacctcaatcattgtataaaacatgtgcttttcaatacacttgttttcttttcttaatcactataatatatccaaaaaataacaattgcaagtcttatacactaacttattaaaaaatattataatcgcttaaatagcgatgagccgttgtttcctgtaaattgatcataatgtgaagaagccatttcaataactgcttgcttgtccaatccttgtgcagcacaaaacgaaaagaatgcagcagataaaatatagccgcgttcacgatcatctgtcaggttatctgagaacttcatattaatcgaatgatttgcataatccgttgtcaattcaatcgatttattttctggtttactactcattctattgcaacctcttttttgttctaaaacactaagtgtataattttttacggtaagttgaataaataattaaaaaagcccaagtcctttgaatttggacttgagctcaaacaaaaagaccagtagtctgatgttaagaacaaaaaacacattagaagctggtcttttatgaattcaattgtaactgaaatcgcaaatattataaagtctgaagataattatattaagcgtgaaagaaaaataatctgtttcttcttaaacctgattaaggaaatcatggtcttggctttagctaaagttgatgatgaaatgattaccaaggttaaagcacagggctatcagattgataagaagaatgagcgctcaatcaatatggcttttggcgaagttaggtatgtcagaagaagatatgtctgcccaggcaaacaagcaaggtatcccttggatgaattaatgggctttgacaaatacaagcgctacagtattttagcagtcaaaaacatcttagaagtaagcagcgttgccacttatcgcaatactgctctagcagtcaattgcctgtctggctttaatattagccatatgcaggtgggcaatttggtaaaaatggccgggaaaaatattaaagcgggccaagaagcagattcaagatatgatgccgcaggcactaagaaaaaggtcccagttttgtatcttgaaggcgatggcgtggtgatcaaaggcactaaaagccggttggaatttcatcgctatcaggtctgtgaaggcattgtcaatataagcaagaaacgcagaaagcgaatcaatgccaaggaatttgtttctttaagccgacttgatgcgctgaacgaagccaaggagtacctggccaatacttatgatctttctgatactgtaattcttagcaacgccgatggcggtgctggatatgccaaaacagacttcgatgacattgtagggctatgcaagcgtcatgagcatttcttggatgtctttcacctaaataagaaaatcaaagaaaggctatattttgcgcctgacctgcaaggcaagctgatttctgctttggaatacaaatacagctatgacaaagttaaaactatcctaaccactgcagaaagccgactaattgatgaattgaataccgagctcaatcatgattatctggggcgcctaaggaattatattgatcgtcattgggacgatattaagccgtttaagaaacgaaaactgactgtgactaaagccattggctgctgcgagagcaaccaccgcaagtatacctaccgtgttaaggggcaaggcaagaaatggtcaaaatctggagcagaaggcatgcttaggatcttaagctgcatcaagaatcgagagctggaattttggcttagcagcgagtttgaagattcagaaataactgtattgactgaacaggaattaaaagcagcggcccgtgacagcttaaagaagcgtcatgaagttcatttaggcatccagcatggcgcattaaccgcacaggtagctggcaatagttatttaagcaagctaagcagaaatttaagtcatataaatatttaagaaattaaggttagactaatggtttaaaggctaccgcaaaaacattgacacttactctaaaacaaataaaattaaaaatttaaaaatttctattataattatattacaaaatcaaaagaattagaaagcgtgtttttatcaatgaaagtttcagcttggcgctcatcatgcacctcaattttaatcgggaaaaaggcctctctttctggcagtatcatcatcggtcgtaatgaagatgctaagactgcttggcctaagcatttagcctttaatccacatcgagataatgtacagaaaaaccattttaaatccaaagacaataagtttgaaatggatttaccaacagctagctactcttattcttcaaccccagaatggacagataagtacggagtgttcgaagaagacggaattaatgaatatcatgtagcaatgagcgccaccgaaagtgcctacgcaaatgaccgcgttttagctgttgacccctttgatactgacaaaggaatcttagaagaggcaatggtcaccgtagttttaccttatgttaaatccgcacgtgaaggcgttcagcgcttaggagaaattgtagaaaaatatggtgcagcagaagctgacggaattctctttggcgatcgtgatgaagcctggtacatggaaatcggttctggccatcattgggttgcacaacgaatcccagatgattcctacgctgttgtcgccaatcaactagctattcaagaaattgattttgccagtgacgacttcatgtattctcaagacctgcaaaaatttgtctacgacaataaactctggcctaaaaatcagccattcatttggcgtgatatttttggcactcattacgatagtgacttacactacaacacaccacgagtatggagcggtcaacgtctgcttactccatctgtagcacaagaacccgaaagctttaacctgccatttattcgcaagcctgatgcaccaatttctgcgcaagacgctcaacgcgttttaagcgatcactacaacaacaccgcctatgatttaaccaatcagaaaaacagaaataatgccactttcagacctatctctgtggctactactcaggaatcacacttgcttgagttaaacggtgaaaacatgattcactggctagctatgggtgtggctgcgcaaagtgtttatgtgccattctatcctcaaggcactaaggtaccaaatacctggaaaaatggaaaagaaacctactcaccaaattcagcttactgggtctttaaactggctagcgtcctggttgatcgtaattggggtaagtacggcaccgctttaagcaatacgcaaagtactactaacgaaaaattgcttcaaattagacagcaatatgatcaaaaattagcacaagaaaaggatcaagaacaacaaattaaattagtggatgaagccaatgccaaattagctaaaactgctactgatgcttataaagaattgatcgctaaactaatcaccgaacaaactggtgactcaccgttgcgtttccaaatggatcctaacttataaacaaaaatgcctcaatgaggcattttttcttactattttttcttagtcattaagccgtccatcatttcataaatatggtcggcgtatttttctagccgcggatcatgcgttactagaataacggccttgtcacgctttttcgctaaatccttaaacaattgtcctacttcttccacattttgcgtatctagcgaagcagtcggctcatcggctaacaaaatatctgggttagcatataaggccgtcgcgattgctactcgctgctgttgcccaccagataattcatttggatacttattaaccagcttttcaatccctagctgcttgagtaagccttgcaatttatcttgcgacaaattattttgcttttttactttatcaatcaaagtaaattgctctttaactgtcaaaaatggaactaaattataagcttgtaaaacaaagccaattttattcaagcgtagttctccactttgcttagcagaaaaattactaatgtctcgaccattaatcaaaatttcacctgaagttggtttttgcaaggacccggcgatcgtcaaaaatgtacttttaccagcgcctgaaggccccataattaaaaccacttcacccttattagcctgaaaattgatatctttcaaagctgcaactttagcttcgcctttaccataaactttattaacatcttttaattcaattactgccattttactcaccaattgcctttgctggatcaaccttcaaaattgatctaatcggaatcaaactaccaataatacccatgactagcatccctaacgtaccactaatcataattgctggcgtaaaggtcattggcacagctgctggtaaagttaaatcagttaaccacatcaagataatcgcaattacaacaccaatagctactaaaattatggattgactgatcgttgcaccaactaaagttttacttggaattccttgagcccgcataacggcaaaattatgcattttttgcatagttaaaatatataggaaaacagcaatcacgatcaaagaaataacaaataagaatccaatcatcaattcaaaagttaagttttgagccgtatatcctggaagcttattaataaaggcttgaattgggtatgtcttggcatccttataattgaatttataattactattctttgaaacaactgcagaagcggctacattaggagcgaccatccgcagttttttccaagttttcattgagccataaacaattggcgcaatattaatcttggcgttatttacaaaaccaacaattttatattttttcttagagccattcagagaaatttgatccccaagcttgtagcctttgtctttgaaactactgtctactgtaatctgattaccattctttgcttttttcccagcaattatatcttgatcttgataaataaactggtcttttttgatgcctaagaattgagctgaaattgagttttttccctttttcttagctacaattcctaattgaccaataattgcttcattcttgccaatttttgcgttttttagatcgtcttttgtcagaattgactgactcatgctgatattggcatttttatttaaaacaatcttttgcgcattccaattttcaattgcttgtgtattctgacttgctaacccaacagccaaagatgacaacataaaaattaagtagctgatcaaaaagatcatcaaaataatcaagccatagcgcaatttttcatgcttaatttctttcagtgctagaaacataactacatcccctttgctagtatgtccaggctcttcttatagcgcgccaagttcttttcctgattttcgggatctgataagcataagctgataacttcatgactaagtaccatggcactccacaattgtggccccatattcaacaattgtcttgaataaattttgaaattatgtggtatcaagtactcattttgcgacatatgcaatttcatcattggttcatatttactgtattgaactttatcaataaacttaactactcttgcataaaaatgattaggatcaaatttttcattaggactcatcctagcatgaatgtcttcaatagcgatgtgatacatataaacatatgcatcaattaaatcatcaaaatatttataaaatgctcctcgagcaatgttggcattcttaacaatatgtgacaccttagcatctgctaacggataagtgctgaattcttctaacaacaccgcttcaatacgtctacgtttagcagacggtaaatttttaaaagtttgcttaaccattttgttttccccttttccaacacaaatgacgacttgtcatcaattacttatatcatagctgattttgacgagttgtcaatacatatacaaaaaaaaagaaggcctctgccttccttctctaaactaaaactcgattatagtagtacaacctagcaacaccatcacggacgctaaatttgcttaatgcacaattatttggcgtatctatcttgtccatgtcgccattactcaaataatgagctgccatcattcgaatcaaacgaccatgtgccactactaataccttaccttctggatatttttgatatatttcgtctaaaaagttagcgcaacgtgcttcaaactctccgtagccctcaccatttttggcatatttaacatagtcgcgagtaacttttccccatggatcaacgacatccggatattccttagcaatatcatccatcttcttgccgtcccaatcaccaaaatcaaattccagcaaacgtttgtctaaatttaatttctttttacctttagtaaaaattttcgcagtctctactgctctcttcattggactggaataaacaacatcaaatttattttcatcaaacttagcggcggattttttagcatattcacgaccaaattcattcaagtctgcgtcaacttgtgcgccctgaattcgattatctttattcacgtctgtttgtccatgacgaataaaaactatttccattttttacatcaccttttcttaaaatcatacccttatttaactaatctttccatttctttactgtttttttagcgttttgaaatttaaaaagcttaaaatataaatagataattagaaaggggaaacattatgtcccgcgttacaattgaaagagatggtctcaccttagtaggagaccgcgaagaaccattcggcgaaatctatgacatggctatcctcatgcatggttttaccgctaaccgcaacactgaattattaagacaaattgccgatgatctacgcgacgaaaatgtcgctagcgtccgttttgactttaatggtcatggcgaaagtgacggcaagtttgaagatatgactgtgccaaacaaaatcgctgacggcaaggcaatcttagaatacgttcgcaccgatccacatgtacgtaatattttcttagttggtcattcccaaggcggtgtaattgcatcaatgcttgccggtctttatcctgatgtgattaaaaaagttgtccttttagcaccagctgctcaattaaaagacgatgcacttaaaggtaacacacaaggcgcagtctatgatcctaaccatattcctgatactgttccactagtcggcaataaattaggaatgaaactaggcggattttatctccgaaccgctcaagttttaccgatttacgaggtctctgcccgctttagtggcccagtatcagtcatttatggtactaatgaccaagtagttaaccctaaatatgctaaaaaataccatgatatttatgaaaatagcgaacttcatgccattacggatgtagatcacagattcactggtcaatacaaaaagtcagcatcagatttaactgctcaatttttaaaaccattattttagcgccgagtaaagtcgaactcagtacgaaagacgtaatgatccttagtacttacgtcaggttcaaattgaaattcaaaatcattaaagtcctgcaaatctgtgggattttttatttgcttctcggcaatgtagcgcaccatttcaccacgagccatcttagcgtgaaccccaacggtcttccacttaccattttttagttcctgaaagtcaaccgtaattaattgtcgtccttgactcaaataaggtttaaccaaacgtgtatattgcttggaagccaaatcgataactatattatcttcttgaaataaattttcagcgatatcactgctccagaaatgatacaagctataatcacgaaaaccaaccattttagtatttaattctaggcgatatgggcaaacaccatcaaaaggccggagcataccataaaatcctgatagaatccgcaaattcttttgaatatagtcaagtgcaggttgtgtaaataaatccggagccatatattggtattgaattcctgaaaaagccaaaattgcaggggttaatcgttcatccaaattcatattttctagttgcaatatgctttgcttagtcacattttcactagcatgccaaaggtcttttaactgttcatttgaccttgacttaagaaatctttctagaattcgtgtcttatccaagaactgcggttttgactgaattggaaatgaatcacgatcaattttcataatttttgcaggtgcaataataattttcatttttagattttgttcctttacggtaaacttaaattgtgattaataaggaggaaaaataatgaatcctgattttgcaattgtcttaaattatcaacttaatgataaggctgatgccgactttttagtaaaaacagcccgtaatatcggtgctcgtgcagtgatgactgacaggcaaactgaagatttcaaaacagcttgcgctaagtatactatttttttagctaatccagaaaatagtactgacttaactaaggataacgtcattgataccatggtcaataaccgtaaagctggtaagactacaattattaatgtgcccgttgaagcaggcaagttttctgccgcaactcaagcaatgctggatacgatcaatgattggatgcaccaattcggtcacgccttcaacgaaggaaaaactagtgctttaaccagtagcgatggctttattttagaaaatcgccacgcaaattaccaaaaatatgtcttcttacctagtcctcttcctgacaaaatcgtggtagaaggcctagtcgaagaacctaaccgggtagaatggattgaacatcgaactgatcttgattttaactataaggatcaaaaattaactattaacttagtcaaaccagatgatgagtttgcttggcaagtgttgcgaattcaagcccaccgacctgaagatgacattttagaaacgaaattttagtaaaaaggcgttctttgtagcagaacgcctttttacaaccttatgtaattgctatttctattttcaaaaaaatttattcttgcttaagctttaactactgaaccattatcaaaaaattctctaaaacgacgtgcttctttatccagagtaatttcatcattaacttgcgataacttatagccaacaaaataaggtggcgcttcaaaacgtgtaatatatttagcacaaataccgtcatcattacgcggataaaagaatagattataagaatcgcagcggccattatacatgatatttaacaaatacttggcaccactttgaatccagtcagcccacaagtcaatgctatttttatctaacaagttaatattgagctcagtgtagccttgaacggggtgttcagcaatgttaacttctaccccacttttttcaaaaagggtctcaccttcaaaattattcgggtgaatatatttatagccatcttcatgttcaaagccaactatctgcatatgcgggtgaatcaaggaaccacctgaatgtggaccatagttcttgtaccaaacaattgactcatattggtcactagcctgcactttttcaaaacaagctagcgcaaaatgcatcaacttgcgattatgttcctgcgtataagtactaatatcgccgttatgatcactagattcaattagtacagtctgccaggtatcgcgcaaggtcgggaacttattcttaagccaaatcatgtcatcttccttggcgtaaatatcagttaaattttcaacatcacaaaatgggcaaacgtttttcttcttatccttacgataagattgcggtttgcctttagcaatgctcatttgaaaaacaagtggatcattagtcatatttattccttttttttatcctgaattgtcaaattaagtgcaacagttaggttatgaagagatatattgcttgaagagttcctctgctgtgtgatattggaggattcggcgatatttgtggttaatggcatcagttgcctgttgaacataagcttttgacttgtctttcatgctcttgcccttagggaagaattgacgcaaaagaccattgcagttctcattggtgcccctttcccatggagaatatgggtgagcaaagtaaatctggcagcccttgatcttggtcatatccgcaaactcagagccattgtcaaacgtgattgatttaaaccaggcaggatgtctgtcaatctccttttgaagcagcctttggcatgtgcttgcccgatagtcaggaatcttgataactacttcaaagcgtgtggttctttcagtcaaagtcattaaagcaggctgattcttgcgtctgacgcctttaaccagatctccttcccagtgcagcggagcttttctgtcttcaacctccttaggacgctgttcaatggaattgccaagatgcttcttgtgcaaagcgtgaccgccatggctgtgatgacgcttgttcctgcgtcttttgagcttcataggcagatcaatattgcttatgtccagcaagccctgatcaatatagcgatagacggttggtgtgctgggacaagggtagcctggcatagtccttttgaattcaccaacgaactcatcgatgctggtggcatcaaatttagctttaaagcgtctggagagcattctcaaaaagacagcataatgcttcaatggattgcgctgatagcagtttttgcgacgcttctcataataaatctgtgcagtatcagcgtaatagtgctcatacaataaatagctgctgtctctttgcaggacgcttccgcgtttgatttcgcgactgattgtcgacttatggcagccaacttcttgagcgataacagtacgggaagttatgccggaatccagcattgcttgaatttgtccacgttgtacgctggttaattgatgatagtgcttagaaatgctagaatttgaattggtcatgaagatcttcctttcttgatttttcgtcacttcaagtttaggtcttcatggcctttttgtttaacacttagtgttgcacttcaattttaaatccgggttccttttttttatttaaaatagtttaaaatctaatgggtaaagttttactataatgtaaaatattttgtagctttactagcataaaaatacttgttatactttgttaaagcaaacgtttattcgaaatttatcaagagacgggttttaataatgcaatctagaacagaaatgagaaagcgaaacaatcgcaacaatctctatcttattattattggcataattgtcgtaattgcaattatttgtggctttgtcattcataatcaaagggtagctgctgaacgtagccagcgtgaatatgcttctacccacttcaaccctaatgtaacaatttatggtgtgcaagtaggcaagcttactgttaacaaggcgactgctaagatcaataaacaagctgataatgtcgtctttttaagaaataaaaagattattgctgaaaaagacgacaaggttcaaactatcagccaagctgaagttaaaaatattttcactaagcagcatactgatttgccaagcaaacaaaaatacgttttcaaatccgccaaaatagatgaagcaaaaaagagtttgcaaaaaatacaaaatgctgtagtcacctataagatcaatggccaggaattcaagctaaaagctgatgacctaattcacgaagttacttacaaaggtggtaaatataaattcaccgatgtaaaaaaactgcatgctaaaatggaagcgatcgatcaagaagtcaaaactctaaagaagagttataaatttactgttcctactggtaacaaagtcaatggcaaaacgattacggtaaaaaacgaaagctatggttggggaatttatgtcaagaaggctgtggctgcagtagaaaatgcttttattaatggtcaagatgttgttgatggtagtaagtatatttatggcgagggttatagtacctatgctcatggttatggcaagagcaatcatggtattggtaaaaactacgtcgttgtctccatcaaaaatcaggaactatgggttgtccgtaaagggaaagttgccgttcacttaactgacgttgtcacaggtactgaaaataagagtaacgctactcctaaaggtgtttggtatatcatgtacaaagaatcacctagcgtattgcgtggttataacgacgatggctctaagtatgcctccaaagtacaatattggatgccatttactttgagcggctgtggcttacatgacgctagctggcgtagcgattggagtaagtcagcctatcttactggtggctcacatggctgtgttaacattcgtccagctgaaattagaagtgtttggaacaacgttttaactaacgatgctgttatcgtatattaaaaaataaagattaatcgcctacttcaattgaagcgggcgatttttttgcgtaaaattaacagaaaagatatagatttttgaaaggatcaaatatgttagtcatcggtattatttgcttggtggttgctgccatttcttactttaaataccttagtgaaaagaacggacaagctaaccaaaaacaagctgaaaacaaaaatgaggcaaaatggcagcgcactttagcaatcattttcctcgttttcggaattttattaatcggttattggattgcattacgctaaaaaagacgtgaattttcacgccttttttaaatataattgattaccacattacccatattagctcttccctttaaaactaaggtaggaccgccgccattgctttttcctttaactattacattaccaaggctaatgcttaattgattatcaatctgccatgataagggaacgtagagatttacatttcccattgaagcagttagattaagcacgactgtatcacctgctgctttagcatcatcaagatagatattggcattaccgaatgaagcttcaagattaattgactgtaaattttgtgaatgaatataacgtgaagaatcgccagccatcttttgattaattacgatattgtcaccatcttcaatcacatcttgaacatgatgatgtgttacttttgtctctgtatcagcatcgtcactatcatcgtcatcattccaatgaaaactcttcttgataacaatttccggatcttttttaaaaagcaagctcaatcccattgaaacaagcaaagcaataaacaaaatcatccaagaggataagaactttttaatgcccaggggacctgcataagtaattactaaaaaagcaattgagaaaacggacaccacaatgctcttatcaagcaagcccttaattaagcaagccacaaaaatgactgtcaaaataattgtccaaacgctaattttgaagcttaataagcctaattgactgatcaccaaaagcgcagctgcagcgattagtcctactccccacaaaattcttgcaaaactgtttttcattataaagaccttctttcatctaagcgtgtgcgtaattctttgtagtatcgacgggatgcatatacagttttataagtatcatgaaactgtatcttgcaatctgaaatcgaccgagttaaaccataaatttgatctaaattaataattgtcgatttggaaatccgcatgaaacctgcgcccaaaatattttctaactcatacaatttatgtttaaccaagtatgccttatcttgtgtatgcaaaattacctgcttggcatctgtttcaaaaaacaaaatctcgttcagtggtaagtagtaagaaacattgtttctaaaacattcaatctgatcattgtgttcaataccttgtaatttcttataaagctgctctatttccggagaaatatttttagctttaataatcagttcatcttctacggcatctggatcaatctcaagttttactttcatgtttctcactcccttctgaatctgatatttatattaaaaaatatttcagatagcttttccatagttttgaactaagtggtaacttttggtttctaagtggcaaaaaaataagacgacctctgtcgtcttattgcttattatcaatgtaaactagtaaaaaatgttatcagtccaagatttgattattttttgctttctactgcatagattaatacttaatagaataatatatgagcactactataaaagatagtatgacaaatacgctagccaacgccataaatgaaacattaataattatcacgctacttagctttaagtaatgttgactcatcacaacgatgatcatccataaaccgatgtttaatactacaaaaaactcaattactttaaagtttaaaacagttacattatatttttgactagatatcttattactcttataccccagtatatttatattctggttatgctgaattgcacgtatgaaatattgggaaacatatactaaaataacttcagcaatactaaacaaacctagaaatatattgtgaatccacattacgtttatagttaaaatacaaactatggccaataatgcaattatccaaaaaagtttgtttattaattgatatgctaagtattttatatatttttctctatccattaatctttacctttgaaactgtcaaatcttttgtgtaaatagatctttctcgtaaattgattttttaattatttatttaatcaaagtaggattctaaggtgtcctgaacctgaccaaagcctttatgaattcgattgaaataacggtcattgtagctcattgcctgaatgccaataaaagcatcaagcgactgttcagttggaaactctgccttaggcttagctttgcgcttgatcacattgttaaatgattcaatcatgttagtcgaataaattgaagctctgatctgcttgggatagttataaaagaccagcagatctggttctatgtctttcaagcttctgataacatggctgtaaaccttgccccatttggtatagaagtcatgcaggacagctgtggcttcttctttgtttgtctgttgatgcacctgtttgaattcgttcatgatcttttcacgatcgtcgacgcgtactttagcgcagatattgcgcatgacatgaaccaaacagcgttgaaaatgagctttaggataagtcctggccaaggctgttttcatgccaacaacaccatcagaaagaaaaagctcaacttgctttaagcctcgggatttcatgttttgaagcatatctgtccagacttcaatgttctcgctaggcgcaatgcagtagtcaatgacctccttgtgcccattaggcttgatgccaatggcaatatagactgcttcacgctcaaatgtttctcggcgcaaaggaaggtatgtcgcatccaaatagacgcagaaaaacttgtcgcttagcttgtggtaagcctcaacctttggaatcatctgcttggaaatatttgatacctgagctggactgtaatggctgccatacatcttttcaattagatcggctatttccctggtggtcacgcccttggagtaaagcttgataatcatgctttccaagatatccgagtgctgcttgtagtcaggcagcatgtgctgatgaaattgaccgttgcgatcccggggcacttgcacttcaattgggccaaattgcgtatcaactttgcggaaataagcaccatttctagagttgccagtattccagccatttctggcatagggatcatagcccagaaaggcagtcaattcagcttctaacaagttattaacagcctgttgtagctctttgcgcaataaatcatttattttgtctggattgaatagagcttgagcaaaatctttggtaaaatcattcatgaaggagttcttctttctgtatgtgtttttgtgttcaaaccaatcatacgagaaaggaactcctttttctaatgtttaaagaaataaatttaaggaatcattcatccttacacaaactattttacagtctcttaactaaagattgataaaaagaaaatataaaatataatgttaacaataaatcacaaattctaaattttacttttgtaatcaaataaaagcttaaataatcaaaaaacacccatacgattaaactaaatatacttacaataagcgttactaattctaatttcatatttccaccgttaattagtatttttagcacatcttaaataaaccgactatctttcagtatagcatcctcagtttatatgtaacaaaaaaggattctatccaagtagaatccctattttagtggacaccctccattagtacattaatcttcttaaccaagaaaaacataatcacggcaaaagctacactaactaagccaaccgccatgaaatattgtacttcagtgccagttgaatagaacttaacaatttgtgcattcactgcttgtccagttgcatcagccatgaaccacatactcatcatttgcgaacgatatgcattaggggctagcttggtcgtaattgataaaccaattggtgaaatcaacatttcagcaatttcaactaagaaccatgaaccaactagccaaaatggactaaccttgcttgctgtaccataaagcatccctggcaaagccatccacatataagatagaccagcaaaaactagccctgctgcaaacttgcctggagctgttggctgctttttccaatgttcccaaagccaaacgaagattggcgttaaaatcataatgaataatgggttaagagactgaaagttggctgctgtaaagtgccaattaccaatatgaagcacggttctttgagcggcaaacagagctaaaactactgagcctgattcttcaatgccccagaagatagctgcagcaaagaacaatggaatgtaagccttaactcgtgaacgctcaaccttagttacttttgaactacgtagcatcatcacaaagtaataaattggcagtgcaattgctaaaatagtcaataaagtaatgacattgtcaacgttcaattgaccaaagccggccattgcagctaatacaagggcaatcaccacgaacccaataactacccacttaataatattaagcaagtcacccttatcaataggatcattaggcgtcaaactttcaggagaaaggtattttttaccgccccaaacatattgcactaagccaaagaacatcccgattgcagctaaagaaaagccggcatggaagttcatttcattaccaaaaatatgaaagccaaaaccttgtgctgcccatggaactaaccaaggtgcaagaaatgatcctaagttaatcccaaagacaaagatgctaaaacccgcatctcttctgcgatcttcaactgaataaagaccaccaaccatgtcagatacatttggctttaataaaccagtaccaaccacaattaaggcaattgaagcatataacgccgttacaccggctggaagtgccaagacaatgtgacctaacatgatcaaaacgccgccataaaagacggtttttcttgaaccccaaacacggtcagacagccagccaccaactagggttgataaataaacaagtgaaccatagattgacatgattgatgcagccgttgtttggtccattcccagaccacctttggtgactgcataatacatgtagaaaagcaggatggcgcgcattccgtagtaactgaagcgctcccacatctcagtaaagaataacgtggacaaaccctttggttgtccgaaaaatgctgtatctgaatctcgtttacccaaagaaaaactcccctcttatctaaggtaagcaataaaggatattataccacgaaaaataaggatctacttcttacatcaatgtcattaagttaagattgacaaattgaatctaatctctgtagaaccgaatcattatgatttagttctttttttgcataaaataaaggcgaaaagaacctaccttttcgccctctgattaaattattaaaccttcaaaattattgccagaaagctggtgttaattatgaaagcccttcataaaaatattttagatcgtcttgatcaaattatcaatgatactggaaagcatattcatgattttatcgatgatcctcatgccttcactaggaagcggtctttagatgcagctacagtcattaaaactactattaatatgcaaggaaaagatttgaccagtgagttgtttagagcttttggccaaaaagctattaaaaataacgataaagtagtcagtacttccgcttatgtccaacgcaaaggttcacgccgttgacatgcacaagactgacctggacggcaaggaactgaccagctacaagctgcaaaaggacctgcgattccacttcgacaactagtacaataacagaaattagccaatatacagcaaagtgtctgggaagaaactcgatttttagcccggatataaaaacacagaaattcattatttttagtgaattcctgtgttttttgtttttgaaatgaaaattcgaaggcttcaccttcttgttggctccatattttttcttaaatgcgttctgcgcataccaaatacactcttcatgtgcccaaaaattggctccacatctgacttgcgacagccatagatgcgtttaccttattcgctttgaagagtctcttttgctttttcttttaaatactgccaattaggattgtagtgaatctgtctttgtcgacctgttttggttttagccaattgggtcagttcttcagttagctggaactcatcagcttcataaattttgaagtttctgaccatgccagtaaatcgatcttttctttgactataatatttgaagttgaagcggacgcctgatttatctacgtaatagtcttcttcttcgttatagtaccagttgtcgacctttgatggatctttcttatattttcgcgtttgttctttttcgtattgggtatacggaatctgatagttcttatctgaataattctcttccagaatcgagtaattgtattcactgccatagcccgcatcggccacaatattttgaaacttatcgaaaattcctctggacttcatttgttctagaaatagttcgaatattctaaagtcagccggattaggaaacagggcaaaatcaactatatattgattagtagtcgctgcctgaatattgtagcctggctttagctgcccgtttttcatatgatcttctttcatatgcatgaaggtggcatcatgatctgttttagagtagctgttacggccagcaaagatctcttcagcttcttcgtactttttagcacgcggaataaaatcttttctaagtttatgtgcgatcttctttaattcacggcgcttggccttattttttgatccgcctggaatggctttaggttctcgatcaattttctcggtcagcttctcaacttctttttccgtttcttgagccagaatctctaagccttgactagtttgggcttcttcttcggccatggctttgactacttctttattgatcagttcttcatataaagcagacacgtcttcctttaacttggcatgatacttctcaatagcttttcgccagacaaaagtgtacctgttggcgtccgcttcaattttagtaccatcgataaaaactgcattttcacggattaatccctcatcttctaataatgaagtaaagtagacaaaacactgcttaattaccttattggcatggtcgcttgatctgaaattattgatcgtgtgataagaaatctttctattgtcagctaaaatcatcatgggcagattctcttctagcattctttcaatttttctgcctgaaaaaactcttctagaataagcaaagagtaaaatcttaagcatcattgccgggtgatatgcaggtctgcctgtattagaagtggtttctaagataacttcgttaggaatagaatcaacgaattcactgataacactggcaatgtgatttgcagggatagaaaaatctaaatttaatgataaagtagtttgtcctgtgatataattttgatacatgtttaagcccactttctattgtttttttgtggtgattaaataatatcaaggaatgggtttaaagtatacaaaaagagcgatgacttcttatgaagttcatcgcttttttcatggcctggaaattagttttttcccagacactttctattattaaactagatcatacatttctggcattctgcaccattttgaattaaacattcgtctgcagtcaagttctcactaccagctaaaactttttctcttattctaacataataaattgagttgcatcgctttttaaaggcataaatataagccttatttaaatctcttgttgttgcattatcttcaacaaataaagttaacgaaattgattgatcaacatatttttgtgcagcagctgtaatatcaataatagcattaggtcctacttcatatgcgcccttttcgtaatactcataattgtctttattaatcttataagctggtacataaattcgacccaaatcagcctctttgcgtgtttcaacaggagctactactggctgcaaacttggtgtacatgaagataaataactaattgatccagtaggtgcaactgctaataagttagcattagctatacctgtctttttaattttagtaatcaattcttcccaatcttctttagttggaataactaatttatatttagctacaatttctttaatcttgtctgttttcggtgagacttcctcatcaataaattttttgaaataatcaccactagcatatgatgaatctttgaatcctttaaaagcaccatacttttcagctaatttatttgattctttaaatgcatggtatgcaattgtataaaagaaaattcctgtaaattcaactgcttctggtgaatcataataaatatgattagttgctaaaaagccatgtaaattcattgctcctagaccgattgctcgattagctttatttcccttttcaattgaaggagcacaatctaaatctgaagacctggcaacacgattaagcgcttgaacactatcagaaaccaaactacctaacttgtcagcgctattcattgctgctgcaatattaagtgatcctaaattacaacaaacatcgtagcccgtcttattaaaacttaagtcttcattataggtacttggcgtattaacctgagcaatttctgaacataaattagacatcacgatccgccccaatttcttttgtgggtttcttcgatttacagtatcttcatacataatataaggataccctgattcaaattgaacttcagcaatagtttggaagaattttctagcactgataaatgtctttttaatacgtggattattaaggagattttggtattctttagtaattgaaatatctgacattggtttaccatattcacgtttaatatcatatggtgaaaacaaagccatctttttattttctttggctagttcaaaagtaatatctggaatcactacgccaagtgataaagatttaattcttaccttttcgtcagcgttttctcgtttagtatctaaaaattgcataatctggggatgatgggcacttaaataaactgcaccggcaccttgtctttgccctaattgattggcataagaaaatgaatcttctagtaatttcattacaggaattatcccactagataaattcttcatttttttaataggtgcacctaattcacgcaaattagttaagcatagagcaacaccaccaccacgtttagataattgcagacttgtgcttattgctcgtgaaattgattccatattgtcttcaactctgagcaaataacatgaaatatattcaccgcgtctctttttacctgcattcaagaaagtcggagttgctggctggaaacgattactaataatatctttaactaaattcaaggccagttcttcattgccatcagctaaaaataaagcattcataacagcccgatcttcaaaacgttctaaaaattgtttattatcgtttgtttttaaggcatatgctttatagaatttagctgcacccataaagttcaaaaagctaaaattttgtgcataagctaatttgaaaatttctttaataaatttagctgtatataaatctagaacttttttatcatagtaatcattatcaactaaataagctaatttttcttctaaagaagcaaactttttcattcttggttcaatatgattttcaagatattgcttagtagcctccttgtcagctttaaaattataatttcctttttcatctttaaatttagcaagtgcatttaaagaaatatatgaatcattattaagattatcagtcattgtcttcacctgcatcagcaattattttattaacattatttacatcttcagttgttcccagtaactcaaatttatatagataaggaacatgtaatttcttagaaattacatcccctgccaaggcaaaagaattaccaaaattggtatttccactagcaataacaccaatacatttttgccgattagccaatttgttcaaaaagtggataacttgcttaggcacagcacctgtagtcccatggccaccagaataagttggcgtaattaaaatatattcttcagaaactgaaatttctttactgagtttaataggaatcctaatagaattacaatctaacttttctacaaaacgtgctgtattatttgaagtggaagaataatagacaactaatggctttttagaaatcccagtcatcatctgtagtctcctctcctgttcccattacatatgaagaaccattaccagaaaagaaatcatggttttcatcagcttgagctgataattgagcgaatacttctggagaaacataagtttcttctgcggtaaaaggagaatcatagcctaaattttgtaaaaatttacctgcattatacaaactgaaatgaattgcatcatcaaccaaatcaaaatcatcataaagctcgtgcaaatatttcttttccaaatcaattagtttatctaagaaatcaaaaacaaattttttcatttctgcttgtttagctggagctaatttctttacggccaattgatatttgtaaccgctataataattgtgaataaccttatctcttaagatcaatctaataatatcagcagtattaggcaatttacctcttgcagctaaataaaatggtaaataaaaaccaccataaagcaggaaccctggcataattgctgcggcgacctttgatttaagcggatcattgcctgtataatacggaattaccgctttagctcttgcttgtaaagtatcattattaactacccattcatgcgcttcttcaatttgttcactagtacataaagtagaaaaaatagttccatatgatcttgcgtggacagcaaccataaaagcaaaatttgcatagatagcttgctctatatcagtttgtgaatttttaatttgggctacatcacccacacttgattgagttgtatctaataaagtcaatccagtgaaagtgcgagttataagctgttgccagtcatcagataattgattccaagaacttatatcattcgaaactgggattttttcaggtaaccaaaagttttgagtaactctgttccaaacctcaagatccttatcatctttaatgtcattccagttaatagctcgcatatttttgccgttgtcattgtaagcaaattcaactggtgactgtgaatgatcataataactcatatatttgctcctatcattatttattgttttatctaatatatgtgtaaacatactatagcatcgtctgctcaataatacaacatgtggatttttggggttatttataatcgatatattgtggttaagccgttttgataatacaaaattattttcaaatttattttatcttccaaaaataatgtaggtgttgttttttgcttttttgacaaaaaaagtgtctggaaaaaaagtcgatttttaactaaatttaggctttaactcaaaaaaatcccattaaatcaaggtttgtatgtaccaagatttgatgggattttgaaatttctgagttttttcccagacacttttttcatggcctggaaattagttttttcccagacactttcttttgcgatttttgctttatttgttagtaccatctgctcctactggcagggccgggaaaataaccgtgaaggttgaccccttgcctaattcgctttccaggcggatggtcccgtggcactgctgaacagcatgcttgacaatggacaggcccagaccagtgcccccggtcttgcggctgtagctcttttccacccggtagaagcgttcaaaaatccggttctgggcttcctggggaatcccaatcccagtgtctgctacctgcaggatcgcctggccccggtgctccttgaccgtaatcttggtcttgcccttttccttgttgtagcggatgctgttgtcaatcaagttgtaggcaatttcataaaccaggcggaagttggccaggatcatggtgtctgacaaattggtctccagcttgattccatgccggtaagccgaaccctgcaaggcttccaaggcctcagtcaccggactcttcaagttcagcttgatttcttcaaagcgctggttttcatccaagtgggacaaacggatgatatcgtcaatcaaggtcaaaagctgggcggaagattcatggatcttcttgtaaaagccatcccggtcttcgtctttgaccaggtggttttccaaaagctcagctgaccccatgatggactgcagaggcgtcttaagttcatgcgacacattggccgtgaattcccgccggacctgctcttcatggtattcttccgtcacgtcaaccaccaagatcgaagtccccttcaaaatcttgcggctgataatcgggctggcactgatttgaatattgcggccgtttctttccacaatcccctcagtatgagccaagcggctgtttttatcgatgatttccttaacatcgtctggtaaggggtcagtgtcatgcaggcctaaaagtgaaactacagccgggttagacaaaagaatccagtcatccaggtcaatcaagatcaagccttcttgcatggcatctgttaccgtctttaattccttttcccggtggtgcagctgctccatttggtcagcgatctgcttgttctggctgtccagcctggtcaagagcggcttgatttcatcataagccttgctttccaggggcttgtccaagtccatttcattcagcggcttgacgatcgtttgcgagagcgtcttggccaggaaccaggacactaaaaccgccaaaagcatgagcagcaaaagcggcgacaagagcctgagcagcatccgccagaaggagtttctggtgatcgcgatgcggatgaccccgccgttattgagccgttcagcgtagtacatggtcacggtcgacaaggtcgtgctgtagcgctcgctggtccccgtccccttcttcatggcttcggcgactttctcgcggcgggcatggttgcccatctttttgggattctcttcattgtcgtagagaaccttgcccttggaattgatccaagtaatccggtagttctccccttttaagttcttgaggtacttcttgccgctggtatttaccccgctggccgccaggtcagcctgggaagctagggcagacatttctgtatggtcgaagtcaatgctcaagacaatcgtgcttaagagtacggcaaagaagagaaccagagaagtcagtaaaaaacttgcccgaaatatcttcttaaacattagtctgcttcatggtagcgataaccgaccccgcgcagcgtttcgatatacttaccagcctcacccaacttctgtctcaaggttctcacgtgaacgtctaccgtgcgcgtttccacgtaaaaaccagtctcccagatctgatccatgatttcttcccgggaaaatacagttcccggatgagtaatcaagagctttaggagtccgtattctttcaaagtcaaatcgacctgacggccgttttcgaaaacttcatggcgctttaagagaatcttgatcccgtctttttcgatcttgtcctccttcttgcggttggtccggcgcaaaacagccttgacccgggaaaccatttccatcatcccaaatggcttggttaagtagtcatccgccccgaaatccaggttcttgaccttgtcatattctgccgtcttagcactggcgataatcaccggcaagtcctcggtcgcggaagtatacttgagccggtggagaatttcgctgccgtcttcatcaggcagcatcaagtccaaaatcactaaatccggccggttattgtccaggaccttgaaaaaagaatgtccgtcttcaaagccgcggaccttgaagttcattgcttccagcgtgtacatttcgatttcgcggatgctttcgtcgtcttccacgcaccaaatttcagtcataaaaaatccccttagcctttcttaaacttatttatagtttaccatttacaagagtgttaaggggtatttcatgggattatctgccagtcttgccggtagttacaaataaggaccatttagcaatattgacggcgtgatcgccgattttttcaaagtacttcgcgaccatcatcaaattgatcaaatattccggattactatccttgttaaagttatcgatcaaaaatgccttcactttgccaaagtcgtaatcgacctgatcatcgcggtcgattacggctttggccagttctacattctggttggccaaagccgttaccgcgtcgttgaccatacaagtagcaatttgggacatgctcttcaggttcagcatgtcatttgcgtctgagaggtgttctttaaggatcagttcggcaatgtccgcgccaatttcaccgattctttcaaggtcgtagaccgccttcaaagatgcactgattatccgcaagtcagtggcaaccggctgctgctccatcaaaaggcgcaggcaggtttcttcaatgtcacgctctgccttgtgaatccggtggtgcaggttaatcgtgtcctctgctttatggtagttgcccgtaaacagggcgtcggttgattcagaaatgctttccttgcacagctggccaatttcttccattgcttcatgcaagtgatccagttccttgtcaaatcttgttctcatttttagcctcctatagccttaaccgaaccggccggtaatgtatttttcagttctttcatccttcggcatggagaagagctggtcagtttcaccgaattcaaccaggtcacccaagaggaagaagccagtcttgtcagagatccgcacggcttgctgcatgttgtgcgtaacgataacgatcgtatagttcttcttcagttccaaagctaattcttcaattttagaggttgaaatcgggtccagggcactggtcggttcgtccatcaacaatactttcggcttgacagccagggcccgggcgatgcagagcctttgctgctgaccgccggacaggcccaaggctgatttcttcagccggtccttcaagtcgtcccagatagctgcttgcttgagggaagtttccacgatttcgtctagttccttcttctcagtaatcccgtgaatccgcgggccgtaggcaacattgtcgtaaacgctcatcgggaacgggtttggtctttgaaagaccatgccgactctttgccgcaggacggtcacatccaggtcaccgttatagatgtcagtgccgtccagcttgatcgagccatcaatccggcagccttcaaccaggtcgttcattctgttaagtgatcgcaaaagagatgatttcccgcagcctgacgggccgatgaaggcagtgacttcgttctttggtatgtgtacattgatgtcatgcaaggcatgaaaatcactgtagtacaggttcagctttttaattgtaattttgtcttccatcattaatttcctccgttattgcgcttgcgcattctgtcagagatacggcgcgtaaccaaagtgaagagcagggtcaaaacgaccaggactgctgatgtaaagttggcaatctgagtggctgacgggttcaaggccccttcagttctcatggcccagatgtgcagggacagggtttcaccgcttcggaacgggttcaggggtgaacttggtgagataaccttccagaagttctgccagttgatgtaagttgactggccggaagtatacaaaagcgcagcggcttcaccgaagccgcgcccagcagccatgattaccccggtcaagatctgcggcatggccgccgaaatcaagaccttgcggatggtttctgacttggtcgcgcccaggctcagggaaccttccttgtattccaccggtaaggaccggatggcattgttggtttcagtagttatcagaggaatagaaagaattgaaatcgtcaaggcaccggccaagatattccaggacatcccggtccacatgatgaaggccaagtagccaaacaagccgataacgatagatggcagggatgacaaggattcgatactgatttcaaatattgtcaggaacttgccttccttggcatattcagccaggtaaacccggccccgatgccgattggcactgagaccagcagtgagaggaaaactaagtaaatagtgttgaaaaactggttgaaaatcccgttgccggctgctcccaagaagtcccactggaagcctttcaagccgtcaaagatgattgtcagcattaagtagagcaggaaggccagcataatccagccgatggcgtagaagattcccgtcatcagccggtcttttattttagcacggctcatatttatttttccttctttccattgccaagcttgtgaatcaatataatcaaaacgattgagatgacgaagagcaagagagccattgaccacaaagccagattgtattccccgccctgggccgtgttacccatgtcagcggcaatctcactggtcaggttgctggttggtgacaagagactggtcgcgaaggaccgggtcttaccgataaccatggctacggctaaagcttcaccgatggcccgggccagacccaagaccaccccggtcaagataccgccggaagcggctggcaaaacaaccttgccgatgacttgccagcgggtcgcccctaaaccgtaagccccttctctgtagctattcgggactgacttgatggcgtcagcggcgacagtagtgatcgttgggaaaatcatgatggccagaacaattgaggcggccaggactgagaaaccgcccatctttgggtggaaggcgtttctgattataggaaccagcttggtcaagccaaaccagccgtaaacaacggatgggatgctgacgtagatttcagttgccggccggaagaacttttcgccgatttttggtgaaatttccgtcatgaaaacggctgagccgatcgcgaacggcaggcagatgaacaaacccaacaagcaggtttccagggaaccaacgatgtaaatggcagccccaacttttcccccgaacatgccggtcttgtcaagcggtgcccagtcactggtaaacaggaactcccaaacgctgtagtgcgccttaaggaaggtctggctgccttggtagagcaggaaggcccccataaaaagggtcaaagcaacgatcaagaggccgcaggcgatgtagtccgcgcgccagcgcttgtctttggcaattgctttttgaactactttgtccataatgctttatttctccttcttacttattagcatgggtggctttagcggcagccagcagtttggaggctacgccgtagcccatggcttcgatcttcttgctatattccttgctaagcatctgctgcaagaatgccttggcagcaccctggggctggcccttagtgtacatgtgctcatagctccaaactgtatacttgccattatagacattcttcagggttggcttaacaccgttgattgacacgatgccgacttgcgggtcaccagtcaagtaggacagggaaacgtagccgattgagccggaaacactttggatcatttgaaccaaagtacctgagtcgtcagtttccagagactggtttgactggctagcgtgcttcttcaaagcgtattgctcaaaagttgcccgggtacctgatgaagatggtctggaaaccaggacgatctggcagtcattgccgccaacctgcttccagttggtcaccttgccggtgaaaactttgatcaactgttcagtggtcaggctcttgactccagcatccttgttgatgatcggggcgatggcggtaatggccacttggtggtcaactagcttgctggctgacttcttgtctagcttttcatccgcgaacaagtctgagtccccgatgtcgatggtgccgtcagaaacctgcttcaggccttggcctgacccacccccgttagtgttgatgacactgtccgggttcttgtccatgaaagtcttggccgcgctctgcgctaaaggcagaagggcagatgacccggcgatgttaactgtcccggaaactcccttggtatcggctacgcagctgtcgatgacgcagccggtgacgattgccagcaaaacaagtgcaacgatggcgactttgttttttttgcgtgacatgttaattcctccttgaattcttactgattcaaccttaatggaggcaagttaaatgcattcagtgatgattgttaaatcaatgtaaaatgtttaattttatttaagcccagccgctttcttaacagaatcacaaagttttcgcaaggctcccctttacttttcagtttattttgcttaatttatccgttttttacatttgtaaaatatagagctttcactctttacaccttttacatatcgcgcaatattaggatataagtgttcttcttcagtccactcaaagaagcgtttaaccgcaactatataattctggattgtggtcggtttcttgccacttgcctttaaaaattctctgtactgtcttacagtgtcgggatctggatgcgtgatccccttttccctcatgtagataaaccattgcttcaatgaagttcgataagtcctaactgtattaagcgaaccatcaataaatatgacaaacttatcaaaaagatcatccaagttgctatgctgaaaatccaactgctttgagcctatcgaggttaccagttcaccgcttatttttcttattggttttatttctaccatcctaacattcacctactttgttactatgctagcttattacattgttatcttgctatattgctataccagcattgtattcttgtagtatcagattacttcagcataatgttacatttttgtcccctaatatgacttcgaaaacgggcttctaagcttaatatacttgttatatgttcaatttattcataattgttaaaaaagctctgaaaagcgaatttatcatgcattatggacttacaccgctccttatgctgaataccttccaatgttgttgggtaggggggatgcagcaccaatatcaaccaaataaaaaggggctagctctgaagctaacctcattcattaaacattaaaagtaaatttataaataagtcatacttgggtttttatcgctatggtttgggtttaaacacgtgaaattgtgctttatattaataccctgcatctgcaaatattgaccaagcagagcttttaatctgtcctgcgatctattattattgttttggatattcattttatgtataccttcatttttataaattgattgagtggtaactggtcagagttgctgctcattttattttgccaataagtcagccaataaggtggtagaagctgtacttcgtactaacaatattaacgaacatacttagaatatagggttacgggcaatgtcattaagttaaggcattgacttttttacctaaaatcaacttgattagtgggcgtttatttactttgaaagtctatcctaaaacttgacaggagggtttaatttgagcgaagagaatcaaaagaagctgtttggcatctcagcgattatttgcattattttattaacgattacctattttggtgatttagccatcagcaataccttaattaattatcacagctgggtagggacgttttgtcagactttttgcgagtttccggtttatcttatttttgccttatgtggacagattacgatgacttatgcctggaaaggcgactgtgaaaatctgctgggggcaggaccgttgtttgttggcgggcttgcactgtcgctttggcagagcaagaagtatgtcaatgaattcttgggctatctgtattcggtacaaactaaccttaaaaacggtaaggcgatagcaatggccaacagcgactcagtaaagggcggttatgcaggctcaatgattataatggtctggctgttgtttttcgttatatttacgctgttggtacaatggtggctgaaaaacaaaacgactaaacagctgactcgctatatgaaaattgcgattttggcgtcattgacggtttggtttgcattggaagttaatctgaccttaaaagacctgtggggacgctatcgcccatatgaactcacgatcggtaatcatgaatttaccaattggctgacgatcaatggcgttaatgggcataagtcattcccatccgggcatgcgatggcggcaacgttatgcatcgttttttcatggttcgtttccaacaataagcataagatctttttcattggtggcatcgtttatggtgtcgtgatcgctataagtcgagtaatcatgggcgcacatttcctttcggacgttacgttctcgtttttcctgaccgtactgatcatctttatcatgaatggtcttggtaaaaagctaattgaagatttttaaaaattagggctgtgaccatcgaaaggtgaccacagcttttatttatgtgttaaaagtcatgagaatacgccacctttgataaaatttctaatcaaagatagcgtaaagcggtttcaaaaattaagcaaaaaacactcatcaaattctgatgagtgttctaagacgttctccgttcagagtcaatgtcttaacttaatgacattgcttcttacatagtagatccttatttctttagctatttattttttagtcaattgccttagcaactgcactgtttacagcatctttttcgtcttcgattaagttaaccttgccttcgatgaccttaatgtccatcttaatttcacgactaagaagtggaacatttaccttaggttcaaagaattccttgaattccttaagtctttcaggagtatggaagacaccggtagtaactgtgataaatgtagcgaattccatgtcaccaccaacagtcttgtcaagccaatcccagtcttctctgatccagtcccaagctgcttgttgaccataatggttagcaagtaaaccacggtaccaaccacgtaaatcttgtggcttaactacgtcagcattttcaaagtcgccaacaatagccttgatagctgcaagatccttggtgctggttacagcgctgcgtaagtcaaccttgtatgatgggtcagctgttctttggtattccttaattaacttatcaactaattcagcattgccaaagttcttaacttcattgattaaaacgtatggacgaatatctgcattcattgcctctaagttgtcttcattagcagtgaaaatctcatgagctgttttaattgagtctttattttcagcgtaaagactggcacttaattcatatggacgaatttgtgcatcttcatcgctttcacctggcttaactttccagcccaaacgagcaacttgaccagcggataacttgtcataaagcttctttaagtccttttcttgagctgattcaggttcaacaaattggcgcaacttagcagcagtagcgtaaagagcattaataactacacttgacttcgagtcagcaaatttagtcaaaagtggcacaacagcagcataagaaatttgtttaccttctgctaaaagacgtaagtcttgcaataattgcaatttggcaattggatcaagttcatcaacatgagccaaaatatcatcaagcaaagtcttgtcatacttaacgataaagtgcgagttgttacctacattaattctaagtgggtgacctgcttcactacgtaaattcttgtagtaacctaagtcgatttccttatcagacataatcttaggtgccttgaagttagcattcaacggaatttgccattgtctaccaacgtctttaccttcaccaacgaagaattgttgttgtgaaagctttaagtgaccatcgctactatcaacatatgcactaactactggataacctggttgctttaaccatgagtgcataatcttgccaatatcaaggtcagttgcggttgaaagagcatcccaaagatcgtcaccagtggcattaccgaacttgtggtggtcgaagtaatacttcaagccttttcttaaggcatcgtcaccaagaagtgaacgaaccataactagcattctagaacccttagcataaacaatggcactgtcaaaggcagagtcaatatctgctggatcattgatttccatttgaattggttgaacaccgtcagtagcatctctagtcaaagctgcaggtgcttcactggtttggaacatttcccaaatatgccaatcaggttctagaccatcaactgacaagtattccatcatgttagcaaaactttcgttaagccataaattatcccaccatttcatggttactaaatcaccgaaccattggtgagccaattcgtgagtaataactgtagcaaccaatttcttcatttcaaggctagtattgtctggatcaagcaataaatatgcttcacggtaagttactaacccccagttttccatggcaccagcactgaaatctggcaaagccaattgcaatgattgtggaagtgggtatttagtttggtaaaattcttcgtaaaactcaattgcattcttagcaacatccaaagcaaagtctaattccttaggtttgtgtgctttggttgcgtaaacaccaattaaaacgccatccttggtatgggtagtctttgattgcaaatcaccaaaggcaaaggcaaccaagtaactagacatgcgaacagtttcttcaaagtggtggtagccgtccttgtccacttcaacttcaggcatattggcaagagcaacttcgccatcttcttcatcccacttaaggactaaagtaaaggtagccttagcttctggttcatcgatacatgggaatgcttgacgagcaaaagtggtttcaaattgagtaccgataatttgcttcttgacaccatcaacttcgtaatatgaaggataaatacccatcattgtatcagtaagtggtgcactgtattctacttcgataatcgccttaccgtttttgccagtttcaattttaatggcttcgtctttttccaatacatcaaaaggaacatccttgccatcaaccttaacgctatcaatggtcatgttcttttgattaatgaaaacaggattttcgattacttcaccagtaacagttgaagtaccattaatttccttttgcttacggtttacgttaatacgtaaatcataatgttctgggtggaaagtttcataaaaacgtttaactgccatatttttcctcctaattaatagatcatttacttttaattttaccaaaataagcgcgaaagcgctcaaaaaaggctatttcttgttgattgtaaggatgacgtttcagttctgtaacattgctgtcatattgagcttgtactatagaagcatagtcattaagaaataaataagttttgaaagaattaattaaatttaataaggaatgaatacatcaatgaataaacatgttaaatctactttagtaaaaatcttagctgccttagcacttgcctttgcttgtgttgcagttgcaaatgctttttctaccaatacttcaactactcaaactgttcaagctgcaagaaagctttcaaaagctgaaaaagctgctaagagatggatcgcaatgcgcgaatcaggtggtagctacactgctagaaacggtgtttgttacggcaaataccaattaaacattggctacttacatggtaacctttcacctaagaaccaagaacgtgttgctgataattacgtttacggtcgttacggttcatgggttaacgccaagagattttggttagctcacaactggtactaaaattaaattcctttaattcccaaaagctaaagaaaaccagcttagtccaattgactaaactggtttttgttttactcaaaattatcttgcttgataaaacgataaagtgcaatgactaaaactaagatcgagcacgccatccctacataggccattgttccaatgtggacagcattgttagcagcttcacgggctacttgattttccattgcatagcccacaacccatttacgcattaataccggcgtcaagacaaaactaactgtactaataattgaagtcactaacgctacattacgcgaatatggttctttaaagaactgtgctaatacgcagaatgctggagcaatcatcaatagcaagatccacataataatccagcgcccagaacttgaattcatcatctgcgcactattagtggcataacgatatgagctccaaagcgatccaccagataaggtattaagcaaactcaagaaataagatccacgttgtccataaacaccaccattattggacagaataccttgaacaagttggaaagtatcagttgatccagccgatgaaaaatcgaccgacacaacttgcttcatataagtagctaaaaacatggtaactgagccacctaattctagtgctcttaacatgcttaattttcttgaagctttcagatgaaattccagacttaaaactcgatcaggatggtgactgtgaccaatgataaaaatccctgcaatgacgatcaaggctaagataaccaatccccaccagaatttaatcatggcgaaaaataaggctaaaacaataatcgcaaccgaaatatatggtcggtcagaaaaaatattccaaaagttcaacttaacatgatggtaatttttccttgatgcatttgcgacattttgattaataatcggctgaggattactaatttttctgctgcgaaattcttcacgtgttgttgctcttgtcttagtataatcggtccgtgaacgatctgcgccggcttggccgtgctcttttttcatgcgatattcacgccgcgacatatgtgccataaactgcagcccccttctcaaagcactatagtagcacattatcacttttttgcttgaattaagaatgaaatttcaaagaaaatttagctttgttttgcatgtgctaaaatgaatattaataattgtgctttttttagaaagagataactttttgaataaaactaaatcagcaaaactgccagctggttggcatatggccttttataccttatggctcggttgctttatcactgggatgggctattcaatgacaatgccctttatttcactatttatttcagatttgggtaattattctaaactgcaaatcaatctttattcaggattagcttttgcaatgacttttattgcccaggcaatagtttcaccatattggggcagcctcgctgaccgcaaaggtagaaaactaatgtgtatgcgtgcttctggtgtgatggctttaactattaccctaactggatttgcacccaatgcaatttatattattgtaatgcgttttattcaaggttctttttctggttatattaacaacgccaccgctttaatggcaagtgaaacgccgcatgaacgtagcggctgggtcatgagtcaaatgatgacggccgggactgccggaaatttggttggaccgctattaggtggtgctctctccagcttctttggcaatatgtttggtggcgcctgggggtatcggattccattcttcattaccggtgttttaatgttcatcgtctttttaggtacaacgttcttagttcacgaagactttactccaatttctcgtgaaaagatgaagccgatgggcgaaatcatgaaaagtttgcctagcgtgaaattgattgtggtgatgtttattactaccatgttggtacaatcatcaaccatgtcaattgatccaattgtttcattatacgtaaaatcaatgatgcctcatggcggggatgttgcctttgttgcaggtgttgttgcggcaacgcctggtcttggaacgctaattgcggcatcgcgaattggacacaagatggatgaagttggaccgttacgcgtattgcgaatcggcttagtcgtcggtgccgcattgtttgtaccaatggctttgactaattcgccttgggtactagcaggactgcgcttcttattagggattgctagtgcagggatgttgccagccgcacagacggtattaactttaaacacaccaagcgaaagtttcggtcgaatctttagttataaccagtcatttcaagcagttggtgccgtgttaggatcgttaatgggatcgactatttccggtttttcaaattatgcaacggtattctggctaactggatttacgttactgatcaactttgtgcttgttttgatttttgcttggggaatttcttatcagaatagataggttaagcatattcctaaagtatggaatttaaaaatgtaataaaagagctgtaaatatcacaaaaaaatatttacagctctttattattttcaattttttacgctaccatcttttcataaatgcgatacatccgattatcataagcgcacattgaaataaccagattatagcccgcgttttctttctgccacttttcaatcgcgtcaactgcgatcttagttgcatcttctgcaggatagccatacacacccgtagaaatagctgaaaaaattacgctatgcaatcccgctttctttgccaaagccagtgaattatagtagcaagaagcaagcatatgtgcatcactagtcttgccagcataaactgggcctactgtatgaattacatatttcgcaggtaaattatagccatgtgttatccttgcttcacctgttggacaaccatgcagcgccatacattcttcaagcaaacgtggaccagctgctctatggattgcaccatcaacaccgccaccaccaagtaatgaattattagccgcattaacgatagcgtcggctttcatcttagtaatatcgcctttaataatttttatatttttcataatcatgtcctcagaaatacccaacatttctttccacccccattctaacaccaacaacatcagttaggctcagaaagaatacaaagcatattgttatttttatattacgaacttgaattgatttctatctttagtatcctaatattaagtttagcgttataggagcaacgaaatgaaaattctacgacgcagtttatgcatcatttcgatcaccttattttcttttgctttgagcattctcattcctagtgttcaagctagcaaaacagttttagatgatctcatcatatttttatatttaattggaatcgtaattctgggcattctgttgttgtctaacaaatttgattacctatcactcagtctaagcataatcttgctactcgcaactatcattgcttggatcagattcccaatgattagcattatttatactttttttatcgcttatctaatcatgtgcttactaactattttcattgccaaaaggattaagaaataaatttatgttttctaaaaaagaactaaaaatcatcaatactacattaatcatcatatatctgctttcagttggcccaacattcatcttcggttttactaaatcaaatgatttcacaagtactttctttttaattgcaaatatcattttagtttgtttattcattatcattgctatcagaattgctaaaatcaatttcaggctaaagacacaatattatctactaggcttcatcactcttatttcaataatagaactagcctaccctggactgacattaaatgagcgcattagcaattattttgctatcggcaatattattctaagcttgctaactactaaaatctcaaagaaattagtttaaatataggacacaaaatgaaatatctgaaaattccaagattaattaacagtattttgattactttacgtcatactgctataaattattgaattcttattactttaaaactacatcaggtattttcaatcattcaataaaaaataagactagcactaagccagtcttattttctattaatcaactattctttgggtgagaattgccatactgttccatcttggctacggtatgagccatcactcatctttgtaaatataaagacaacttttttcgtcctaattgtgtaaccgttttttgattcagttgtatcaactcggcccaaatcagccttaacacctgtttggggtggattatttttcttagtagaatatgcttgtaaaatttctttattaagtttagtcttcttttgctcagagttgttactatttttagcaactaaaatagcatgattctttgtaaaatacagatcaaaccaattacttaagcgattttctgtgttgtctactgttaatgttcgattaacccagtttttaggtaccgttgtttgattattgtagaaaaacattccaccaataactgctacaagtactgtaactactgcaattacggataacgtcattttctttttcataatacgtttcctcttaaattcagcattaattatttggcactaagcctctcgaaataagtcttacatttcctgaatacatgctaacccatcggtttctatttgttttaaaattgtgatccatccaggtactgtttctatacaaatagccactgtaggcaccatcattataataaaccttagacggagttgtattaagtaaattcatagcatcccctttaccccaactactatatctataaacattagatacatacttgtgaagtggagcatttttgatcggtccatagactttgactcccttagtttcttgaaccgtagtttctgatgcttgaacacgttgattatttgtagccaagactgtagctgcagttacacctaaaagtgtagcagttgtcaataatacttttttcatttttatttctcctcgttttgttctaattttaataatacttttttgcgagccgaagctggtgcaggaatgttcttaacatcataactgtatagataccgtctatacagagtagtagcactttttcctactttttcacgcataacttttgaaagatatcctctatatccgttgtattcaaagtaatgagtgggaccataatcgcaacttgaacctaaagtgatccaaattctcttaggcttatagtaatctgctcttaattctgaacttacagttgattgtgtttcagttgatgcatcaactttgcttgaaaatgtaagtaaagttgtaccaactaatcctactaatgacaatgaaactagctttcttgaaattgatttcatttttatacctccgtaattatcaaatgacttatacaaattatctattctctttttctcccatcctttcaacacctggcttgacatttaatttaggtatttcaaaagtatctatactgcctaaaatgacaaaagccgttataattgtaagcgtaagtttgtttctttttcttttcatcattgaggtaatctttatgtacggtaaaaaatttaaagaaatcagaattaagcagaatatatcattagaacaagcagcaaaagatgttgtttcaatttcaactttatcacgctgggaaaatgataaattagacatcaatttttctcaactaaaccacttactcgcaaatatccatttaacattaagagaatttgctagatattgtgaaattaatccatccgatactttctcaattaaagctgcaaaagcatataattcagatgatattaatcagttgcatgcccttgctcaacaacaattagataaatactatagttccagagatagatacgatctatttttaacagcaattgctaataattattattttgacctgactcaaaaaaatattttctcgcaagaagatataaatcgattaaattatctattctctcatgttgaatattggtcagaattttacataacagtttttgcaaataccgtttttctgattaagccagaagttcaatatcaaatatgcaataaaatcttaagccagctatatttacaagatttttctagctgggatatttttattgattctattggttcaatattaaattcactaactagtttgattattagcaatcctagcctagcccaaaagctgttagaaaaaatcaataaattaccaattcctattcaatgcagctatatgaaaattagaagaaactttttagataaattacttcattatcgattaaataaagataacgaaaatgaaatcttaaacattatttcttcacttaagactcttggcctacctcagattgctcacaacttttctacactttttactcgtattaaagacttgtaatcatctccttcttatttttatgtttttataatactctcatatctatttcagcttcaatacttttgcagatttgcaaaacgaatttaaactccatacaaaaacgccttgcccgaaagcaaagcgttttttagcataagcaatttttgattaacccttatctgcacctgcagtaattccgttaacgtagaatttctgcatgaagacaaacaagatagtaattgggatagcgatgattacacacccggcaacaaattgtgcgaagtatgcagtcgcgttacctttagctgtgtgcaccatgttatacaaaccataagcaactgtataagtcttagcatttcctgaagttgaaagaataatacctgagaaaatgaagtctgtccatggagcgatgaaggcagtcaaagcagtataaacaatcattggctttgaaagtggcaaaccaatatgtaagaatacttgccacttagtagcaccgtcaatttcagcagcttcgtcgattgaccgaggaatagtatcaaagaatcctttagcaacgtagaagcccaaaccggcaccaccaacataaactagtaacaatccgaagaggtttaacatgttaagacccttcaagatgtagtacaaagcaatcattgacatgaagcctgggaacatccccaataccaatgcgatctgtaagaatggctttctaaatgcaaagcgaagtcgtgataaaacgtaagcaactgaaatagtcaaaaacgttgaaattaccattgaaagcaatgaaataactaaagtattaatgatccagttaccaaatggatattgtggattagtaaaaatcccaatatagttctgcaatgtgaatttttccggccagaaggtcgaaacgaatccagtatcattgaatgaaaaacttgctaagacgatccagacaatcggtaaaatccaaagaatcgctaaaacaattaataagatataccgaaagattaatgagagccgtctttgatttgaatatgacttcatgtctagccctccttaaatgcattagtacgacgatatgcaatcaacgaaacggttgcactaataataaagatcaagatacccaatacggcactggcgttataacgctgttcctgaccgaaggtcaagttatataaccacgttaccaacaagtcggtcgatccggcgccgttatacttactgttcatcggtgcaccacccgtcagtaagaagataacgttgaagttgttgatgttaccaataaattgttggataagtgaaggtgccattacaaatagaatttgtgggaaagtgattgaacggaaaatttgtgcggcattggcaccgtcaatcttagcagcttcaatttgatcttgtggcaagttttgaataatcgctgttgaaaccaacatagaaactggaataccgatccacatgttaacaagaataacggtaattcttgcaactaaaggtgaagcttggttatcaataaagtgaattggtgaactaatccaatgcaagttcatcaagatattgttcaaagcaccttggtagtccaagaactgcgccatcatcaaaagtgaaacgaattgtggtacagcccaaatgataacaaagattgttctccagaatcccttgtgcttgattccttttgattcaatcagaagagcgagcaaaacaccaaagaagaaagtcgtagcagtagctgccacagcccagatcaaagtccagcctaagactgggaagaaagtaccagctaagtcaccactcaaaacatttccaaatgcttggaaacctgtccacgagaaagcgattgggtgttgacgatcatagttggtaaaggccattgaaatcatgaagatcgttggcaaaatcgtaaagaacaagatacccaataatggaataaccatcaaggttgcgtgtaaccgagtatcaagcaaactcttaagttcttcaacgttagttggaatatggtccccatcacgcttcaaaatataattatgtctagttgagcgtaagttgacaatgtataggtaaatgattgctacacataagatcaaggccaatacaccgaataacaaaatcaaaactgagtttgatggttgcttggttacataaacgccttgtgcggcatcataaacaacttttttggttttaatagtacctaatgtagctaatgaatttaaagtagggataccactgaggataaaccaaacaataaagataatttctgaaagtaagagtgaaataccttttacccattgtttgtttgccaaggcgttactacccattaagaagaatgataacttggtagcaatgtcaccttttgaccaaacctcgcgatatgttgctttaggagctacatgctttttctttagaaacataacttctccccttcttaggcaaaaaggctggacaatttttatttagcccaacccttgcttatgcttttagcaaattatttcttttcaatgttcttagcgagcttagcaagttgtggcttgtattgtgctggcttaatcttgccgtcgtaagtaccactgataagtggagctgcaccattccagaatgcggccatttgtggaagcttaggttgcaatactgagttacctggcttagccatttcgattacagcttcagcaaccgggtcactcttaacagcacttgagttgacagcgctcttcaatactggaatttgaccagcgttcttatgagcaattaattgtgacttcttgttagtaatgtaagcagctaaatctgaagcagccttagcattcttggtgttagcattaactgcgaagccttcaataccaaggaatgcttccatttgtacgctcttaccaccaacttcaatcttaggatacttagcaactgcgaagttcttacccaagatcttcttgatattagcagcgttccaaggaccgtccaaaatagcttgtgcgttacccttcttcaattggttcaaagcgtttgaagtttgcattacacccttgttcttcttttgagctgcgtaccacttcaaagcattaacaccgttttgtgagttgaaagttgagcccttaaggtcttcaccattcttaccgtaaagtgtagtacctgctgagaacattactggccacattacgtaagcgttagtaaagtcggtagctacaacaccctttgaagttaaagtcttccagtccttaacgtcgttagctgataacttagacttgttgtagtaaatggtttgagcttgttgtgcgtatgggaatgcgtaaaccttgcccttccaagttacaccctttgaagcaacatcgacatagttgtcttggatatccttagttgctgatggtgaaagtgggttaatgtaaccagcttcagccatttgacctaattgatcgttaggaacttcaaagacatcagcagcctttgatgggtccttaccaacgtctgtcttagcgttagctgaaccgttaggactttgaactacacgaaccttaatattcttgttcttcttagtaaagtccttagcaatttgcttgtagtaaggaacttgttcagtatccacccaaagagtcaagttagccttcttgtttgaattactgctacttgatgatgaattacttgagccgtttgaacatgctgctaatgataatgcagcaagaacagcagtactacctaaagccattttcttccaaatcttcatgactttttcctcctaaaaaatcaaaacaataaacaattcttaacaacagtagcttctgctacatatggttgtaagcttaattaatcaaatttgtactgcgttttcagtacaagagttagttcacaattgccttggtagaatccttgtcaaagaagtgagctttgttaacatcaaagcccatcttgaccttgtcacctggcttgtgataatcacgtgaatttacaatagcagtaaattcagtaccatcaacttcttggtgaatctgaatagttgcacccaaaagttctgaaacaacaacatttgattcaattactgaatctggccaggtttccataaatgcttcttctgagtgaatgtcttctggacgaataccaaagactaagtctttgtcgttgtagcctttttcttccagcagttttgccttaccttcaggaataccaatattcaagcctttgccatcagaaattcgaccgtccttgtagtgaacattgaagaaattcatttgtggggaaccaataaatccggcaacgaacatattaactggcttgttgtaaacttcaagtggtgagccgatttgttcaactctaccaacagacattacaacaactctatcagccaaagtcatcgcttcagtctgatcgtgggtaacataaatagttgtagtacccaagtcttggtgaagtttagcaatttcagtacgcattaccacacgcaatttagcatccaagtttgataaaggttcatccatcaagaagataggtgccgcacgaacgattgcccgtcctaatgcaacacgctgtctttgaccaccggacaaagcacctggcttcttatccaagtactcttcaaggcctaacatcttagctgcttttttaaccttttgatcaatttcatctttaggcgtgtgacgcaactttaaaccgaaggccatgttgtcataaatggtcatgtgtggatacaaagcgtagttctggaaaaccatcgcaatgtgtctatcctttggagcaacatcattcattactttatgatcgatttccaaagtacccttactgatgtcttccaaaccagcaaccattctcaatgtagttgacttaccacagccagatggaccaacgaaaacgatgaattccttatccttgatatgtaagtcaaagtcgttaacagaatatctgtcgttacctgcatattttttgtaaatatggtttaaatcaacctcaaccattgtttcccctactctctttaattatttttcattaaaaactttttcaatttcactcaatttcaactcagcagttgttggaacgatgtaatcagcttctttcaaaagctccttatcaccaattcctacggcaaattgacctgcagccttgattgcttcgaccccagctttggcatcttcaaaactgattacttcatcagcctttaaccctgcaatttcttgcgctttgatgtaaatttcaggatctggcttaccatgatgaagtgttgctggatcaacaatgccatcaaattcatccataatacctaatctagttaaaatcttaggagcattcttagaagcagaagcaattaccatctttaagttttgcttcttagcatctgccaataactcagggatcccaggcaaaatgtcctttggcgtcattgtttctacttgttcaacaaatttagcgttcttttcagctgcgaacttttctttttctgcttcagtgtatttgtcttcttgaccaccgtacttcaagatcaggttaagtgaatccattcttgaaataccacgcaagctatcaagttgagcatctgttaaggtaatgcctaattccttagctaaattgttccaagctgtaaggtgaaacttagctgagttagttaaaacaccatctaaatcgaataacaatcctttaagcatttgtagtttcaccttctttaagagtaactttcttatcgtgaactaatacatcaatatcttcacccttaagcaaagtaagcttagttccttcatgatcaacataaacttcgatcaagcgaccacggtagttgatcttgaagctgtagtgatcccaaccttcaggaacaaatggattaaacttcaattggttgtgatcgtaacgcatgcctgcgaaaccttgaacaattgtaagccatgaaccactcattgaagtgatgtgcaaaccatcaacggtgtcgttgttgtagttatcaaggtcaagacgagcagttctttggtaaagctcaacagccttcttttgcttgccaagttcagcagctaagattgagtgaatacatggtgaaagtgaactttcgtgaactgttaatggttcgtagaagtcgaagttcttttccttttgttccatagtgtattcatcgttcaagaagtagataccttgtaaaacatcggcttgcttgatgaatggtgatctcaagatcttgtcccatgaccagtgttggttaattggacgttgatctttgatttcgctaactggacgaatatccttgtctaggaagtcatcttgttgtaagaagatgcctcgttccttgtcttctggtaagtacatgttatctacgatgtcttgccatttagccttttcttcgtcagttacgcgaactctttcttgagcttccttagtagcaagtggcaaacgttccaaagtgtatttgagaagccatcttgccatggtgttggtgaaccagttgttgtttacgttgttttcgtattcattaggacccgttacaccgtgcattacgtacttgttacgccactttgaccagtgaactctagctgcccagaatcttgcggtaccaactaaaacgtccataccttcgttcttaacgtagctgtcgtcgccagtgtaatcagtgtacatagcgattgcgtgaggaatgtccgcatttctgtgaatttcttcaaaggtgatttcccattcattgtgacattcaatcccgttgaaggtaaccattgggaacaatgcacctggtaagccttgttctttagcgttatggtatgcgcctggcaattgatcgtgacggtattgtaaaagtgcccgagtaacactaggatcagtaacacataagtacattggaacaatgtaggcttcagtatcccagtaagtagcaccaccgtatttttcaccggtaaaacctttaggaccaacgttaagacgttcatcttcaccgtaataagtcatgaataattgacaaatgttaaagcggataccttgttgagcggcatcatcaccagcaattacaacatctgatttgtcccagcgcttttgccaaacggcttcatgatcagctaagttttcttcaaaactcttagcttgaagcttggtcatcaattcagctgccttagcatcttgatcatctggtttgacgtcacgactagtaacaacaatgacatctttttcaagatcgtagctttcgccttcatttaactcaactgaaagcttttcatgaagttgggctgcttcagttgaaacatcacccttaactacttcaccattatgacgaagactttgcttaaggaggactgtaaattgtggaaccttgtatgggttagccttagtttcaaccttaatagttcttgcttcagcattttcacctaaaggcatccagaattttgcatcgtagttactgtcttcgttaacaacagttccatcaagtgctgcatcaaagtcgatcttagctttaccacttaaaacggtagccttaactttaattaaagctgcttcttttaaggtaatatgtaaaaacctttcgaattcgaatttaaccttagtatccttaccttcataagtaaaacttctagtcagaagaccttggtgcatatcaagtgctaagtagaaatcactaaacttaactttagctaagtcaagtttttcaccattaatcgtaattcccatgttgataaaacttggtgagttaggaaccttaccaaagtactttggatatccgttcttccaccaaccaacacgcgtcttatcagggaaccaaacaccagcaaggtaagtaccttgtaagctgtcacctgaatagccttcttcaaagtttcctctcatacccatgtaatcgttgccgattgcagtcatactttcttgcaatcttttatcttttggttcgaacttatgggtaacgaccttccaaggatcaatttcaaaaattcgtttcatatattctatctcccgtaatattcgaggttctctcttgtttacgctttcattatcctttagttgaaagcggtttacaatattaaatctgctgttaccgttatcaggattagttaatagaaaaagaaggtagatcttaatctgccttctttttttgcttattaaaagtaacttttaatgaacactcactacaaagccttttggtgccaattgattattctcataatcttgactaaacgtgttctcacaattgatctctactggatgatcggtcgtgttaaagtatgctttaatgctttcattcccctcacgatcgacctcaattaacccattctctgttacgtgtaacttaattcgacctttaccgaaagtttcatcatgttgcaaacgaaagtcaatcaattgatgaactcgttgccaaaccggaccgtcttcttttgcccaatccattggtttacgacaatcaggatcgttgccaccagtcatacccatttcagttccataataaatgcatggactacccttttgcataaattcaaaagctaaggcttgcaaagccaaatcttggtctccattagctactgtcaaaattcgggctgtatcgtgtgaatcaagcatgttcatcatggctgcattggtagcatcgcgatatttcatcaactggtctgtcaaacgactagttaattcttgtgctgacagcttatgcttgaaaaagtgatcttcaatctgcaatgtatatggataattcattacgccagtaaactcatcaccgttaagccatggacgagctgagtgccaaacttcacctacaatataaaagtctgacttgatatcagtaacagccttgtggaatttcttccagaagtggtgatcaacttcgttagccacatctagccgccaagcatcaatatcaaagtattttacccagtaagtagcaatctctaacaagaaatcctgtacttctggattagctgtattcaactttggcatatgcttttcaaaggcaaaagtatcgaacttaggactaccctcaccctttaatggatcgcggtaaggttcaactggatattcattaatgtggaaccaactagcaaaacgagaacttggaccatttttaacaacatcttgccattgcattgattgatcacccaggtggttgaaaaccgcgtccagcatgaccttcattccgcgggcatgagcttcattaacaactttcgcaaataaatccttgtcgccgaatgccggatcaacttgcaaatagtcaatcgtatcatatttatggttagaactggctttaaaaataggacagaaataaaggccattaacacccagtttcttcaagtaatctagatggtcaagcacgccttgcaggtcaccaccatagaagtcttcgcggccaggatgatcctccggattccacgctttaaccccttggggatcattagacttatcaccgtttgcaaaacgttctggaaagatttggtaccaaacagtatgcttaacccattctggcgttttcaccatatcaatttcatggcaatatggcactttgaaataagaaccatcttccataatggccttgtctacatcactgctaattgcacgatcaccgacaactacactagtgccatcactgccaattacttcaaaggtatacttcaagcgatgatatggtgcttcaagcgtaatgccccaatgatcttcacactgccctacgccaattttttccatctcacatgttttagcctgttcaagtggcaaataattatcgcagtaatgaacaattacttttttaacgtcatttttagcactgtgaaaacgcacgcgaacatgacttggatcaactacaaaactatcttcactttcagttcggtgtcttaaagctgctaattgcatatattaattctcctttttcaacacaacacctgcataaggcatcaaagttaatttttcattagttaattgatattctcccgcttttagtgttgcaacagtataaccggctggtatttcaacagttgtcttttgatcactcaatgaaacagctacaatggcactttcatcatgtaaatcacgttgataaacatagctattcttatccgttgaaatcatataatacgttccaatctggaataaggcttcttttttgagttccagcagttctttgtaaaaattaaacatgctggtggtatcgttaatctcattagctacgcaagcatcatcctgtttaatacctgttatccatggtttaacttcactaaaaccatggttctcagttgcatcccacggcattggaccacgggccggcaatttatgtgtttcactaaccatagctaaggccgcatctttgctcaaaactttttctgcatcctttaaccatggcgctacagtttgatcttcgaattgatctgcactagtgaaatgtagattctttaaccctaattcttcaccgtaataaattactggaattccgcgttgcaaatacatcaacatcgccaagctcttagcctgagtctgtgttctagctacgcgtgtagccaaacgggccatatcatgattattccaataaagagtaggctgcgatacgcctgctaatgtttgttgccaaaccacttgattttgtttaaaggccgtcaagtctaactttttaggctgatattgctttgaaaaacgctgatcacaattagaatcatcatcggtaaagtaccggaaggtaattacactatccattaggtgattacgcttagtcgtgtaatcaacagctagattgacactagcacttgcagcttcacctaataaaagcgtatctggataatcctgcttaatctgctcacagaaaggccgcatccattcctgcacctgtggtaagttagcgaaaaatggttccgcaacaattggcttgttcacgtccccatctccagttggataattttgtcgcaaatctgccttgccaatatggataaaagcgtctaaacgcaaaccatcaattccttttttcagccaatactctgccacttccaacatagcatgccgaacttcgggatttttccaattcaaatcaggcatccgtttatcaaacaagtgaaagtaagattgacctgtgcctgctggatctggctcccatacactgccaccaaagaatgaaccccagttattaggtcgcttgccatcatgaccagcgaaaatatagtagtctcgataaaggctatcggggttcttgatggcatcttggaaccaaggatgttgatcagatgtatgattcaagacaaagtccatgatgaggtggatccctgccttatgcaaatccttgattaagttttccatatcttccatggtccccatatgaggatcgattgcgaagtagtttgaaacatcatagccgttgtctacttgtggtgaaacaaacacaggattaagccagacggcgttaactcctaaatttttcaaataagggatgcgtttgcgaataccattaaggtcaccaacgccatcgccattgctatcttgaaaagacttaggataaatttgatatataattgcgtgatcgtaccaatgtgccataattaatttcctccacgcatagtttaaggaaaattagaaaccgttttcaacatcatatttattgttagcggtatcaaaaaagcacaactcaaatttgaattgtgctctttgcttacttctttttaaatatcatgttccaaacattccgccacttgctgcctttctcctgcaaatcagccactggctgcgttacctcaatacagccaagatattttccttgatcattatgcaaactataaaaggcaatgttcaccggaatcccatctttatgaatcataatcgacaatttaccacgtttgccttcgtgcatctgctttcaaactgccttaacatgaccttgactgtgaccgggatgaacttcaaagacagttttgccgatatctttttcagttcgcttaaataagcgatgtttattcatcgatgaccaaacaaccacatcgttttcatctaggacatccatttcctgaggaatagtctcaaagatagcatttaactgttcgacacttaaactgccgcctattaattcgattttatctgtcatttactttgctaaccttataacttcacgggcaatcatcaattcttcgttggttggtacaatcaatgcttttacttttgaatcaggcttagaaataaatttttcaccgtctgttcgattagccttatagtctggctctaagccaaggtagtggagtgccgacattacaccggcacgaacacctggatcatgttcaccaatacctgctgtaaatacaatgccatcaataccatccatctctgctgcatatgcaccaacataacgtacgacacgatttacgaaaatctttcttgctaatctagcatgctttttcttacttgccaacagatcacgcatatcagaggaaacacctgatacgccaagcatccctgacttatgatttaacatgtctactgcttcttctactgtcatactggtcttttgcataatatactcaagagcagatgggtcaaaatcaccactacgtgttcccattgctaccccagttaatggactaaagcccattgaagtatcaagtgatttgccgtttttaaccgctgtaactgatgcaccagaacctaaatggcaaacaatcaacttaagcgtatataagtttcttcccattagtcgagcagtacgtggagctacgtagcttactgaaataccatgtgcaccatattttctgatcccatatttctcataatacttataaggaattggataaagataattaacctgatcaagactagtatgatatgaagtatcaaacactgctacttgtggcacatccgggataatcttcataaatgccttaattcccatggcttctggcacattatgcaatggtgctaattcacccaagtcaaaaatttgttgaagctttttttcatcaattaaggcagactccctaaaaactttgcccccattaactactctatgacctacgcctgctagttcatccagactttttaatacgtgaaacttctttaaattttcaattaataagctaacagctgcttcctggtctggaatcgaagtatttttaatatattctttgccattcaacttaattttgaaaacagcattgtccattcctacacgatcagccatccctgaagcgataaccttttcgtctgggaataaaaaaagcttatatttaaatgatgaactaccagaatttattgccaaaacttttttcataatcgtgacctctattcatattttatctcttatttttagtatagcgctttcacctataatagaaaataattttaaaagcagttaaaaagcacctctgagttatcagacgtgctcgttattttttcgatttatctagttgattggcgccgaattagcttaggtttgagcattacttcaccttgaggtgaacccgattgggcaatcttttgcagtagcattttagctaacatttcacccatttcaaaaattggttgtttaattgttgttagctttggattagaaacttgatctaaaaagacaccatcaaaaccaataactccaaagtctttcggaattcgagcgccttcatcttgcaattgccgtacaacacccactgcaattcgatcactggcacagacgaaacaagtatcttttttaaattccttaaaatgttcatgaatcacatcttgcgcagcatgactatgattagaaacccgaaaaatttgtggtatcaactggtgttgttgcaaagtgttgatataaccagcttcacgtgaatattcaaatggctcttttaaatcaattccaataaagacaatgtgcttatataaccggtctaaagcatattgagtagccatcttctctgctaactgattatcagaatcaacaaagtcatagccgcggtgattttcaccaaataaaacaaaaggcttatcgagtttatcaaataattcataatctttgtttcgcgccccggtaattaaatagccatctgcattttccttttcaatttgattaggatccgtaactaattgcatcgcatactgcttagtatttaaaccacgagcaaaaccaaaaagcaagttcatatagtatggctcagtggtatcaatatcttctaaagtgacgaattttaccacgttagtccgattattaactaaagcctgtgcaattgaattgggatggtagtttagtttctccattgctttttctaccattgctcttaattctggcgttacttgctcaggatgattaatcactcgtgataccgtcatttttgatacatttgcttctttagcaacatctgataaagtagtcatattattcctattctaagtacatctttctgaatcggtttaaatctttttggctaaagccaagctcttttttgaaaaatccatcaaaactgccccagccttggcgaatagtttccgtaattccacgaatagccggtccctctcccttggtaatattcattttagaaactaggctagcaatttcattatcatcggggaactgtttagccaaagcaaagtcatacaattcattggtcaataaataatcacgcgaaatggtgtcatcatcaacacctaatgcagttaagatcagtgctgaagtcattccagttctatctttgcctgcactacaatgataaactagcgcatcttcttcaggtaattcaatcaattccgcaaaaattttagcaaattcatgttgactatgtgaattaagcaaaacctgctggtaaatttgaccaagccaattgtcacccatatcaggaatatgatggacaaagcgatataacttgttatcgcctttattttgcttgcggttttcagaataaatatgtgcatcaacaaaacggacatttgaccaaagcttgtcaggcgctgaattttgttcatacttagagcgtaaatcaacatctacggtaattcggcgttcaactaacttttcttgatcttccttcgacaaggagctaagtgaatcagaacgatatattttgttccactttacatgttgacccttgtcattttggtagccgccgatgtctctgaaattcagcggtcgatccaaagctaatattcgatcatgcttcatttttccttgcctttcctcattaaagtgttaataccgtacttttattatatcattatcagtcatgtgcaaataaccgagcagcacgaattgcacgttgccaacctgaataaagtttttcacgttcaactgcactcattttcggctcaaaggcctgtccaatcgtaaaggtatgctttaactcgtcaatatttttccaatagccaacggcaaggccagctaaaaaggctgcacccatgctggttgtttccagcgttttagcgcgttcaatttcaatccctaaaatgtcagcctgaaactgcatcaggtaattgttgttgctagcaccgccatcaacacgtaaagcaggaatttcaatgcctgaatcttgttgcatcgtatcaacaacgtcacgggtttgataagctaatgactgcaaagttgctttaattatatccttgtcagtagttccacgtgtaacaccgaagattgaaccacgagtctccgcatcccaatatggtgcgcctaacccagtgaaggcagggacaacgtaaacctcgttctctgatgtcgactcaagcgctgcttgttcagagtctggcgcatgcttaatcaacttcatcgaatcgcgtagccattgaattgcactaccagccacaaagattgatccttctaaagcataagtaatcttaccattaatgccataaccaatggtcgttaacagattattgttagagtctgttggcttgtcccctgtgttcatcacaataaaggcaccggtgccatatgtatttttcaccattcctggtttcaaagctagttgaccaaataaggctgcctgttggtcaccggccatcccagcaattggcacttgtccaccaaagaacatatatgacgctgtttcaccataaatctctgaattcgagcgcacctcaggcaacattttcttaggaatattgagcaaatgcaaaatatcgtcatcccacttgagcgtgtgaatattaaacagcatggtccgtgaagcattagtgtaatcagtcacgtgtttagcaccatcagttaacttccaaactagccaactatcaatcgtgccaaaaagcaactttccctgttcagctttttcttgcgcgccaggtacatgatcaagaatccagcgaatcttagttgcactgaagtatgggtcaataattaagcctgttttttgacgaatttcatcactgtagccttctttttttaatttttcagctaattctgttgtctgccgtgactgccaaacgattgcatgataaattggctcacctgtatccttgtcccaaacaacggtcgtttcacgttggttggtaatgccaattgcggcaatttgattaggccaaatgcccgaattaataaaagcattggcaattgttgtttggaccgccatccagattttattagcgtcatgttcaacccagccaggctctgggaaatattggtgaaattctttttgggcagaagcaacttcacgtccatcatggtcaaaaataattgctctagtagaggtggttccttcatcgattgctaaaatatatttttctgtcatagttattctcttttctgcaaaagcgctttcttataatattactgtttttctaatgcagattctagcagttaatgtaatagatacggtataatttttataaggattttttaaggagggcattttaatggaaaaaaatcaaaaaattgcggtaacaattgcgggtaacgatagtgatggtagtgcaggaatgccagcagatttgcattcattctatgcacggggcgtttatggcatggggctgatgaccgcggctgtagctggtaatacaaaaggaatttttgcccaacaaattatgccgcttgattttatccaaaagcaattcgatgtgttaaacgacgacttcaagattaatgcgactaagacagggatgctggctaacaaggaaattatcgattgcgttgccgataatcttgaaaaatacgacatgggtaaaatcgtgcttgatcccgtcatcatcactaagcacggtgccaccctacttgatgatgatgcctaccagaccttcttagacagattattgccgctagccgatgtaattacgcctaacttttatgaacaacaaaagctaactggcttgaagctaaataataaggaagaaattcacgcaggcgctaaaaaactacaagagatgggtgctaaaaatgtcttgatgaagggacgtcatgactcagataatcagactgaagtaactgatattttgttgactgaagatggcgcatttcacgaatttaccaagcctttctttaagactgatcgcgtgaatggcacaggtgatactctctccgcagttattgcggcagaattagctaagggaaagtctgtaattgatgctataaaaattggtaaggactttacttacgctgcaatttctcacccaattgatgttggttcaaaatggggtccgatcaatcacttggctgcacaggaagaaaatagatagaaaaaacaccgaagctcagattttgagcttcggtgtttttatgtctgttttcaattaaatcattgctgtgtagagatacagtattacacaaataatgaacgctattacgtatcccatgattatgctaataactcaatgaatatgatgatgttgcatccaagtagctaaccagtcgcccaggactagacaatatgatcctactaaccagtaattgatctttttctgattaattgctggtaatggcaagattaagattattattagcgctacagctaaaatatatttcaaggctgtatagagtttaggacttagtaatgattcacgcaatttattttaccttgtttcttctaaatcatatattcgatttccattaatttttggatttacttatttcttatagctcttaatgatccaaaatataccaagcataataaaaaggatcgataatactactagttgcataactggtttatatctaagaacgcatgaatctattagaaataccacaccaacagcaataattgtcattccagatattttgctttccttttttataataattattacaacagcaattaagattactactgcagttacaattgaagcaacgtcgacttgcattaacttaagtttttccttccatctaagtcttcaactattattttaaatcatgtaagttctcctgcgattgactttgtatcatatttgttacaaattattactcagaccaactagcaataaagtttttatagcctaatacaccaagatcctgtctaatctcttttgttttgtccttttgatccaaaaataatgctttcatataaaacacttcaattctataaatcatcaaatgaaacgacccagtagcattaataatatattccatcacatcatcaatatgatcaaaatgtgtcagttgtttatgaacctttctgtcgtaacaaaccaccagataattttctagcaatcttaaatatctttcagtcgttaactctgaaagctcagatttgtttgcaaaatcaagcaagcgcccaattaaaaagtccaattcatcttgtggccacatcggcatcgtattaaccagtaatctcaacaggtctggtcgctcaagccaattatttccttcatcaaactcagcttttattttcttcctgatttctacatcaatcttgtcagtcttccccttaaaatatgtcaaagtaattagtgctcgcaactttagaatctcattattagatgaattcattatctgctgacaatacttatccaaagcttcagtatctttcgcactaactgcttgattcattttagtttcaaattgcttctcaacttttcgttcttctaacgtgtagtcatcttgaataagatcacaaaattctactaaatcaatttgatgctcaagcaatatttgaaataagctttctgcatttatgcgatttttatcgctttcaacttttgcataaaacggtcgactaagaatcccttcgcacatctgctcttgtgttaaccccaacttcaatctttttttacgcagtgcttctccaattttcatagcaagcctcctgtacaatttttaataaaaatagcactttatactttttagtcaatgaaaaaagccgccccgagggacggctttgtagtggcgtagcatgctacgaatcaacgtaggagttggtcaagcatatgctttaatcgcttcttaagagctttcttaaagcgcttgatgcttccgcggtcaattggtataactactagtacgagaaagatacaccacttcacggagaatacacctccttctgcacgtaaagtaaaggcgctaccctttgtgacgtgcattttaattttatcatgatataatacagttagtacgagaaagtatgcacgtgatgtgcgtgggctactagctggtagctcaaaaattagcagggcggtcgaatgaccgtcttttttgtgcaaaaaaacagcaacgaaattaatcattgctgctaatttacttacttctttttctcaatcacaaaataatatcctgctgtcaaaatttgagcaattccttcaagcgtaattgccaaatctgcaccaaaacgcgctacaatcagcccgcctaaaaacgagccaattggaagcattgatgacagaatagagtcattaattgtttctacttgacctaaacatacctatcttttttagtatatggttctacgcgtggtgctagttaaatcgttttagttaataaaaaagtccaattagactagactcaagttgtaagtaatttaaatagaaaagagtctgatctaattgaactatctcaagcttaatcgtttttctcaccatttacaagttagttttaatcggttaaatgtgatttgtcgctcgctgtataagctttatgcgcctgatggacttaaacatcgtaaaaatgttgatcagaccaagcttcctgatagttctatcttagcgatgctcatttggcaaactgaaattggaattgaatctcaacgaagattctgtaaattcttcgttggcttatctcattctcgttttaaccgtcgagctcgaatgctcttgcctctaattcgttgtatccgtcagggttggaatcaggaagtaaaggtaggtggagaattattgattatcgacagttttccgattccagtttgtcagcctgttcgcaattatcacgttaagatcttccgtggcatagccgatattggttataaagcgacgaaaaaaatctactattatggcttcaaagtccacgcaatagtgagtgatgatggctatctgcttgactacgcagttactaaggcgtcggtacatgatgcaaaagagacggtagaattgatgatcaatgctcatccaattaaccattatcttttaggagatgaaggctatttaggaaaagacttagcagccaagctaaagcgtatgggatacgtgctttggacaccatatcgtaaaaacatgaggggtgctaaaaagcataatgatcatcagttaatggcaattagaagaacaatcgaaagcgacttttctttgcttagctattacaatgctgagaataatcgagccaggagcttagtaggttttcaacaacggctagaaatagctattttagcttataatatggcatattgtctagaacgatttaactagcaccacgcgtatggttctatctataaatataactaccatcgggataaaacgttattgctcgcttatccttgtaggactcaattaatgcattgattgaatttttatctttgaatcccattctttttgctaaataattttgcgtcctgcctgtatccttacaaagggaatttaatgttctctttagatacttaaaatcatacttcttatttaaagaatacattaaatctaaaagagatattattacaattgctaatctgtgaggataattaccattatccatattcaaatatttgcgatattttgtagcgactttaggcatggtcttcaacgaaatatctaccaaatctccattatgacaacatatatttctaattaaatttagcaattctaaactttgaattagacttttaatatctaaatggaataatttctgactaatttctttacggttatcaggtagcatcaacttggctaaatatatactttgcccgaatgataaagtatttaccataagccaaactgtgggaaatattcttgtacggtccgttcgttcaaatttttgaacatctatatagttagactttttcacttgatgctgcaattgtgataaaaaagccagttcttcattttttatcttatacttatctatttttacgcccataattcttccacgacgtttaacagtacctaaatatttatttcttccactattttgacaccacttttcaaagtccaaatataaatatgggtctgtcttacctaaaatataagagatttcattgttcaatgcagtttctatatcaccaattgcttgaaaaatttcttgctttaaacgttgatctctatagtatcttttaaccaattcatcaaagctaatacccatatactgattattatcatgatcccaaaatgcataagaatactgtttcaatttataatatcctattatttttaacgtattaacctgcttttcgaatttaatgctattttgatcaattccagtgattccttttttcttaaaaagaaggacttggtctacatatgaaagatgatgctccatgattttctccataaaaaaaccttcgctgatggataaatccgtcatcacgaaggtatgatctatcattattatacaagatttcccaaaaaaatgtagtatttagctagtatttttatcgaacgtatgattaattatatagttatttacatttcaaagcaaacagtagataaagtaagaaaaaaacagttacatgccataatgtaaacttagagatttttagcaatctacatctatgcataatttttgcatgaaaacagcaatgatgagtgtattttaatttacttctttttcccaattacaaaataatatcctgctgtcaaaatctgcgcaattccttcaagtgcaatcgcccaatccgcaccaaaatgcgctacaatcagtccacctaaaaatgaaccaatcggaatcattgacgataaaatcgactcattaatcgtttctactctacctaaaatatgcggactaaaactctcctgcaccaacacttcaaagttaatattcatcatcacaatccatagttcagacgtaaaaaacaaaatcaacagtagaaacggcatccctttgggaacagctggctcaagaacaattgctaaacctgataacgtgagacaaatgacgactagccttttaatcttgcttttatcaaaagttagtcgctgtaccagtacactgccaactaacccacctattgaagaagctaattctaaaccgccatagctaatcgctgatttagtcaaatgctcagtcgcaaaatatggcaagcccacagaggaaataccataaaatagattagtcactgcaaaaggcatgatcaagcgtgctattttgccttcttgtttcagagtttgccagcctttaagcaaatcttgccaatagttttctgtgaaatattcattcgacttattcgaaagtaataatttcctagacaatattagtcgcgtataaaaagctagggcgcttgcaaaaaatactgcagaaataattatcgtggaatcaagtgacacccaagtaatcaataacgttgccgctgcattcaaaaacaaatccagcgttttataagtcatttggaaaacgccgtttactttagttagctttgcttttgaaataatgactggcaaaattttttcttcagcaggataaatcaaagttgagccaatcgttgaaatgacgtatatccctagcaaaagccaaattgttaaatcttgccacagtttaatttgaaacaacaacgccgctataacgctgtccactatctgcactagcgttacaagcttaagtagctttttaatatagacacgatcaatcaacggtccgaagacgaacgacaacatttcaattgatgagtctgcaacaaagattaacgataagataagcggcgaatgaaagcgcaccttgaaaaaccacaagatcgccatgtaaaacaacgaatccgcaatgttggttaacactcgtcctgctaataatcgtctgacattgacattttctttttcaattaagttaaacattttcccattccttttcacaacactactaatgtcgctgaaagccagggaaaattactatttagttttagtttaaaatcccagactttcagctaaaaatctgggttgagccttaagtagcgtttgacgaatgaaaggaaataattcattcgcaaacttaaccctaaaatgtcgcgcattttagtcctcgctttctgtgaaaattaagatcattatagcatgaacagtggcttatcaataatagtcattctatccttatatttttcgtattttcattcaatttcagatcatgacttatgataataaccaaattaacttgcgctatttcctgcaatagttttaataaatcactttgtaactcaggatagatatttgccaacggttcatctagtaaaaaacattgcgcgccagtttttaaaacagcagaatataactttactaactgtatttcacctgttgatagttcgctcatctctctatctaaaatcttttcaattctaaattgtggcgaatcaaaaacttttgcaaaatactcgcttttataaacctgacttttatcagaatatgatcctaaatagtccctcactgaacaattagggagtggtatatcttgaaataaacaacttatgttcgattctctcagttttcttttattaattaaatcagcatctataccatttatggttatttttccttcctttttcggcgtgtataggccaattattgtcctaagcaaagtagattttccaattccatttctgcccctcacaatataaaatcctggagtaacaaaattggcagaaaaattttgggtaaataacggtgttttttcatctaagtaaatattaaaatcatgtacttgaatcaagtttattttagagattatttttctaccatcttgttcattcttcatggttagtatattgttgattctcatccacgctactttaaatgattcaaatttaaataaaatagaaaaaatttcatcaacctgtcccaaaagttgattaaaatattgaaaaataattgaaaaggaaccgattgtcatcttaccggaaatcactgataaaccgccattaataaacaatactaattgaaaaataagttgtaaaacaatctcgctattagacatatttaaattgagaagaaaatctctcttagcaacgcctaaaagcgttcttttagtattgctccatctctcagtttctattttctctcttcggttaccttttacttcaatatacctgcttaaccattcagtaaaaccagaaaagtacttattataagcttctttcaattttaaactaacttcaaaaatcttaggccgtaaaaataaatatatgagactatatgcaggcaacaggatcgctattaacaataaaaaaccagacccagccataaataaatatgtaaaaatcaaaattgaagaaagggcgattgaaataatttgatttattgtttggaataaaaaagtcaacacttcagtagtatcttcagtaattctatctgctgtttgaaccgaattcatctttgtaactgctagcgtatccttcacatacagttctttcattattacatcattaacttccatgtttatttctctaaatcttaaaatctgaattttgttcataaaatatgacaacaaaagtctgataagacttaaagtcgttattaatacaatactacgtacaaaagcagccctatcagccttatatactaaggaatttaacagtattccttctaagtaaacattaaaagtcaaaatgccagtactgataatattcattcctaatagaagccaatattcaattttatactttttatcaattttgctaaaaatcgtatgcatagtgtcacctaactctgactagcagtcaaaaatgttaaaatataatgaatataaaattagataaattttatattcttatttatcctatgtcaatactaaataaattgatttggttttactttcatgctgtatttgatattatgtagttactaactaccaaataactatctatcaactacagaaagagaaaaatatgactgaaaaagcagcaattaacatccgtgttaataaagaaactaagcaaaacgcagagaaagtattaaacaaactaggcatcccgatgtcagtcgcaattgatatgtacttacgacaaattgcattgactgacggcattccctttgatctatcttccaagaaaagaaaaaagaaaaatgatcacgaaacagcaatgatggtcgcagaagctacagctcaatatgaaatcgttaaatccaactgggaggataaattagctgagtttattcctgactggatgaacatgaataagatgactaaagaggagcttgaagcaaggttagctaagcatgcccaagatgcaagagatggtaaaagtgtcgagattagcaaaacttttagcgacctgaataaagaattaggaatttaaatttcatacaagaatatactgtcaaatcaagtcctaacgtatctgtagaacttaaagagatatatagctctatcttgcaattatctcgatctccaaaaactgctcgagattatgtaaaagatcttgaacaaactatgcaagcgttaaattattttccagaaagatatagaaaaactccttcaggaaaataccgacgagttaatttcaaaaaatacgctatattctactttatcgaaaacgatactgtacacattattgatgtcatactagcttcatcaagtacagtattcaaatattaatcctttgccccattctagctattaagctatactagacagaagaaattaaacgaactaagggacaataaaatgagcgataaattaattaaaattgcatacctctacgaagatttaatgaatacttacggtgactcaggcgatgttaaaatcttgagctttttgctaaagcgtgaaggctacgacactcaagtcgacaatatttcacttggcgatgacttcaatgcctttgactatgatttcgtcttcttcggcggtggtcaagactttgaacaaaccgttgtagccaaggatttaccacggcacaaagaaacacttgataaatacatcaacgatgacaaacctatgctctgcatttgtggtggttaccaactaatgggtagttactataagaccaactcaggtgtaacaattcctggcttagacattttgccacttcacactgtcttcaagagcgacaagcgaatgattggtgatacccgttacatgaccgaatggggcgaagttaaggcttttgaaaaccactctggtcaaacttacttcgacaacaaggacaagttgcatcccctcggcgacatgatcgaaggctacggcaacaacccacaagaccacgtcgaaggcctgcgctatcgcaactttattggttcatactcacatggtccactacttaaaaatactaatgtagctaatgccatcatgaaaatgattatcgcttggcaccaagaacgtgttagcgaagccgaaaaagtcacagaataaaaaagacccagtcagaatttctgactgggatttttcattatcaaattaatttaaaacacgtttagcagctgagggataaaagtaggcactgatagcctgctttctcaccccttgactaggagttgcagcgtgaacatattgtccatcaccaacataaataccaacatggtaaggagctgaggcagaaccccagaacaacaagtcgcctttcttaagatgacttaacgaaacctttttacccttagtaacttgaccataagtagttcttggtaaggtctttttagcggcttttttataaacgtattgagctaagccagagcagtcaaaggctgaaggaccggtagcaccgtaaacgtaacttttgccaacttgttctttagcaagttggactacggcgttacgtttttctgttttgctttgactagctgcttggacagtttgcgtttgaagtggaacattaatgaatgaaattcctgtaaaaaatactgacaaaactgtggcaaacttaactaaactacgtttaaaactcaatttatttctccttaacacttcttatctttcaacgttttctatattaccgaagaaatattacagccttgttttaaaatgactactataaaattaagcaatgtaacaaaatctgctatttcttgtaaattttgcttaacttgaaaaacactataattttctatatgcttaatacattaatttaggagttttttattatggataagatagatagttatgtacgccactttttaatattaatcgcgctaattttaggactctcgctcgtctcagaactgcgcgaaattattgcctatgactcatctaccattggcattatctctttaaccactgccattatctgcacttttgcttcgggcattaccttgcaatttcacaagcttaattggcttacgatcagtttaatcttaattctttctgcaatcgtaattctattctggttcaaaacctatacttttggtctcgttgtcagcatttttctgatttataacatcattgtatttttggtttgtgttactaatataatttttcaaaagaaggttgaatagttaacttctatgtcagtcgttgatctctataaaaactcagcttaaattgcctatctttatgaaaagcataaattaggaaggaataattatgactagcatcattgtgtttatcgctgttacaattatggcgatattcacaggaattatatttatacgcgtggtgctagttaaatcgttttagttaataaaaaagtccaattagactagactcaagttgtaagtaatttaaatagaaaagagtctgatctaattgaactatctcaagcttaatcgtttttctcaccatttacaagttagttttaatcggttaaatgtgatttgtcgctcgctgtataagctttatgcgcctgatggacttaaacatcgtaaaaatgttgatcagaccaagcttcctgatagttctatcttagcgatgctcatttggcaaactgaaattggaattgaatctcaacgaagattctgtaaattcttcgttggcttatctcattctcgttttaaccgtcgagctcgaatgctcttgcctctaattcgttgtatccgtcagggttggaatcaggaagtaaaggtaggtggagaattattgattatcgacagttttccgattccagtttgtcagcctgttcgcaattatcacgttaagatcttccgtggcatagccgatattggttataaagcgacgaaaaaaatctactattatggcttcaaagtccacgcaatagtgagtgatgatggctatctgcttgactacgcagttactaaggcgtcggtacatgatgcaaaagagacggtagaattgatgatcaatgctcatccaattaaccattatcttttaggagatgaaggctatttaggaaaagacttagcagccaagctaaagcgtatgggatacgtgctttggacaccatatcgtaaaaacatgaggggtgctaaaaagcataatgatcatcagttaatggcaattagaagaacaatcgaaagcgacttttctttgcttagctattacaatgctgagaataatcgagccaggagcttagtaggttttcaacaacggctagaaatagctattttagcttataatatggcatattgtctagaacgatttaactagcaccacgcgtatatttataaaattatcaatgcgcatgtaacctataaaaagcattatccttatcgtaaattagtaagggtcactttaatcagtctcccatggatattttgggtcttcccgtttactctagattggagtacccatatcactttagtaatagtcagaattccatatacaatcatctggagtttgttaactgcggtaggattgtatattgatattaagatgcaaaataaatatcgacatcacaggaacaacaatggacactaaaattttaacagcaatcatcttaattatcgtagtaattgtactagcctactcaccattttataaaaggtatcaactattttacttgaataaagtaggctattgggatatcctaatccaattcctagtaattgcaggtatcaacttattcattggattaaaatacggtctaggtgccctgtttctattgattgttcccgttccactagacattattttcttaatctcaatgatttattcttactttaaaattagaaaattgaaacgcaaataactcaacaaaacggagccaactaaagcttcgttttttgattaatcttatttttcttctgtttcggcgttagattcaaagccatcgcagccacgacaaccaacactgatccgacccaatccattggcatcattactaagttaaagaatattacagaacctatcgttgcagaaaatggctcaaaagcatctaataaacttacagttgatgggattacataccgcagcgcgtttgccataatttgaaacggaataatcgtcccaattacaataactgccgcagtatacagccaaacttcaggcttattcggaactgcatgaaattgcggatcaattatcaacaaactgattccagcaaaaatcatcccccaacctgttacaaccatactagaaacttttttaacaatgttaactggaatcaaagtataagcagcctcaccaaaagcggataaaatgccccaaaatagtgcaactggcgtaatggccaaatgattaaattgcccatgcgttgacaataaaaacactcctaaaaaagcacataacgccgctatgatatccaatctacgcataacttgcttgtgcgtgatagctaaatatcccaatacaaaaaatggcccaataaattgcaagattgtcgcaatagaagcattagccacttgaatacacataaaataaaatagctgcactggcaataatccaaatatgccataggctataataaccaaaacattgtgcttatttttcaacgtagctattggtttttgctttaaaaatcctgaggcaattaataaaactgctcctgaaataatcaacctgacttgggttaaccacattggtgttaatttaggactaatatcaaacaatcctttagcgaataatcctgacacaccccacattacagctgccattgccgctagaaatgtccacaatcttcgtgtttttgctggtaccatctagttcacctttttctttctcattcacctaataattaaaccacaaaaataaggatacctactgggcatcctcaactttattgatgagtttttttaactttctttttcttaggtgaaatattcaaggccatagctgccagcacaactaaaatcgaaccaatccagtccattggggtcatcaccaaaccaaagcaaataactgaaccaacggttgcagaaaaaggctcaaaagcatctagcaaacttgccgttgatgccttgataaagcgcagcgaattagtcattaattggaatggaatcagggttccaatcacaatcactgccaccacatctagccatacatgtggcgtattcggaatatgcggcatctgtgggtgcacaatcattaggcaaattcccgctgacagcaatccccaacctgtaacgactaaactagaaactcgcttcaacacactgattggaattaatgtattggtcgcaactccaacagctgaaagcaaaccccagaatagaacgctaggcgttaaagcaaagtgattaaaacgcccatgtgtcgccagcaatactacgccaataaaggcacagatggcagcaagcacatctattcgccgcattacttgcttatgcgttacagctaggtagcccattacaaaaaagggaccaacaaattgtaaaatcgtggcaatcgaagcattagcttgttgtactacaataaagtaaaacaattggactggtaataaaccaaaaatcccatatgcgataatcgtccacgcgtcatgcttatttttcattgtagcgattggcttttgctttaatacgccagctacaattaacaaaataatgcctgaagttaccattctaatctgtgatagccacattggtgtaatctcaggactagtattaaataaactcttagcaaatagacctgatattccccacattatgcaagctaatccagctaaaaaggcccacaggcgccgttgtttttgtgtaaccattctttttaatccccaacttttctaaaactaacatactctatcataacaaaaacgggctagcttgaactagtccgttaattttttattcatcatttttcttaattgggtttctgctaggcattagctgcatgaatgtagcaacaataattaaaaagccaccaaacatgtccattgggccaaagtccgcatgaagcagtgaaactgacaggatcgttgcaatcagtggctcgaaggctccaagcatccctaccgtacttggttcaatatactgcacactagataagtacattgtataagctaacaatgttccaccaataataatataaacaattacccaaacatcaactggtgcaagttttggcattggttgagtgaagtaaattggtaaaaaggcaatgcctgcaaccaacattgctgcgccgattactggaatcggcccatactttttgaataatttcccaggtaatactgtattaatcgcttcagaaaaagccgcaattaagccccagaaacaagcaagcggtgataaagcaagttgatcgaatctgccacctgtagccaagatgaaggttcatacaactgctaccacaattgaaatcgcatcaattcttcgtggccacatcttacttctcaatgaagaatatataattatgaaaactggcgctaaaaattaaatcaccgtcgctgtcggagcattgctgtacttgactgctacaaagtacgataattgtgagctccccattcctaagaaagtaaaaatgatcaacataatgattacttttttatcatgtagcattgccttgacttggtccaagtatttccaacaagcataaatcataagcagggcgcctgaaaaaagcaaacgcagacctacaagccaagcagtatttacattagtgctagaaaataaaaattcaaccgccgtacccgatgcaccccaaaaacaggcaccgacaacagctaaagtcaatcctttataacgctaattcacattcacacatcctttagattaatgtttttcattgtaacatgggctaaaggaaaagttcaatgcttctaaagttgatttaatctatataacgtataacctgacacgctagccaataagccgattgtaaaaagcaaccaagattctggatgaaaggcaattaaaacaagtgaaagaaagcctgctgctaaactagaattgcgttccattcgctttttgtcaaaaagcagaccacacataatgccaaacatagttagcacataaaatgagtcaactaacagtaacaaattctcaataattgctagatcacttggctttacttttacactcaaatcagtaaaaatctgagcacagccaaaaaataccatcacaaatgcagctaagatcgtgataaagctaatcgtacgaaaaactgacttcaccttttgagttggcgtttcatcgataaaggtttttaagaaaaactcgtgatctttttttgctactacagctctgcccatcttcttgtcataccagttcaatagaccagaaccaattagcataatagcaatcacagcaaactggatgacaattaaacgcatgaaaattggaaaggcatagattaccgtcaataacaaaattactacatagatcagctatgcataaagaaagaaatgcagacgctgtttatttttgaaaatagtttggaatgtttttgaattaggatcttgcataagacttctccccactaaatcttattacgaaaactcaaccagaaatttgccccactgagaatcaagccaataacagaagctacttgcatgcttggctgcatgaaaagcaagatcagtgataaaacaacagttaaaacgctagacgcacgaattaatttacgatttccacctaaaataccgacctccacacaaaagagtagaacaacatataggccatcaccaatcagccaaacattttcaaagagattggcaaaattaccggtaagcggcttagccaaaatgtcagtccaaagctgacgtgcaaaagcaatacttaaaccgatatttgcccaaaagagcaagaattcaaataagtgaagaaatacgtttttagtaaatctaatactagtcagtgtttcccagaatgtatcgtgttttttaatcactatccttcgatcaagaaaggcaccaattgaatagtaaatcagaattgcaatcccttgaaatgcaatcaaatgcataaaaactttaaagtcaaacatcaatgtgaatagtaaaactactacataagctaactcaaaatataatacacagcgactaaactttcgctcgctaagccagtgcttcaattctcttttattcatatgatcactaatattgccattcatattctcaccatcttttaataattatctaattatgcaaaaattgtataatgatttcaaaattttgtctagtccttttataattgatttagtaaatatttttcgaggtaaattatgaattatcccattttaattgctattttgatcttcttgctgtgctttggccgattcatttggatcattactcacgaacgtcgttccttacgcgctggagttagcttagttatcaccttatttagttttttttttaggtgtagtcattctggttaatatcgctgaccttgatccacattacaaagactggattttgccattatttgtgattgcgctatttgctgtgatggctggaacgattatctttgcattaactttgatcattatgtttttctacgatggcattaaaatcattatcaaagaaggaaaccgctggacaaattatctttctctgggcatggggatttccattatcttcttcctatttttatatcctcttgtgggacgaattagtcatgatagctggttaaagtatccctatatttttctatggctagtcatcatctacttagtcactatcatgatgatgtatactttaacttcttggattaatttaattaattggcacatgccgcacttagactacatcgtagtgttaggcgctggcattatgggaacaaaggtaacaccacttctggcagctagaatttcccggggaatagaaatttatcacaaaaatcctggctctaagttaatcatgtctggtggccaaggacctggtgaagacattcctgaagcagctgctatggctgaatatgctgaaaaactgggtattaataaaaacgatattattatcgaaaataaatccaaaactacccagcagaacttgcaattctcacatgcactgatgaaaccaaatagtcgcttctgtattgtaaccagctcctaccacgtgtatcgcgctctggttttagctaaacgtcaaggactcaagtgtactggttatggtgccaaaactaagtggtattttactttaaatgcttttgtgcgtgaattcattgcatatctggtaattactaagaaaatgcaattgactatcatcggttttctagcagctatcatgattgctgctgtcgcatttcatttttaatttattgcgttaagttgagaaacttagcgttttttattgatttatcttttaatttttttataattatagtcaaatctatagaaagcaaggtgtaactatgaggattcgtaaaaacaacttgtcaaactgtcattagtcaggatgacgagtcctgactttttcaaaaaagtaggttacttatgtcagaaacaaaattcaataaaactcttcttagtgtcagtcatgtggatttttcctaccctaagcgcaatttattcaccgatctaaatttttctattgctaatggtgaacgtgttgctctagttgggcctaatggaattggtaaatctacactaattgacctaattcgtaagcaaatccaaccagatgatggacagattatttgtcacggtgaaattaattatgtacctcaagtcaatgatcaaactgtaattaatgactcaaagagcgctggtgaaaagcgattagctttaattgaaaatactatttggcttcctggttctcttctcttattggacgagccaacagtttacttagatgacacaaatatccagaatttactctacttactcaagaattatgatggagcaattctagtagctagccatgatctggattttatcaaccaactatgtgagagaactattattctgcagccaaataatgcagtttattacccaggaaattacgcacagtatctcgaacaaaaacaattagataaacaagccgtacacaattttaacgaaaagcgagatatattaaagcaacaaattactgaaaaagtctctactttaaagcaaaaaagtactgactataatcattttgctaaaacacaagacaatactggtcgctatccttcacggagccatgatcatgtccaaaaaggattaaatagtcggcttaagcgagctgaacgtgaactggctgagcttccagagaaacagcatctatatcaacatcaacttaaacttcctgaatttaaaaagtggccgactaaaatacataattactctatcaaaatagatcaattactcagtccccaaaataagactttattatctaatacacagttaaacttgcaaacagccgatattattggattaatcggccccaacggctgcggtaaaacaacattgctcaaatatttagaacactacattaatcagcagcaatctttgccaccagccagctacattggtttaaatacgactaaacaaaagaaacctgccacagtagcagatttctttcacgagactattttgagcaaaactgaagttaagcgtcttttagttaaaatggatatgtttgtcgatttgactacaagactcacggatttgagtggtggcgaatttgctaaattagcattaatcaagcagctataccttgaacaagaatctattctattacttgatgagccgactaactatcttgatccagaaagtgtgacggccttggcccaaatgctaaaacagtcgcatctcacttgtattattgcatcccacaattgcaaatttttaacccaattttgccaacaaatctataaaattaagcagcaaagactaattgaattgcactaaagcatttctcttaaacacatatttgctaagcatatcctttactatccccatctatattaatgaagatcacatttggtgctgcagaagtttggtgcgtttctttattatatttaccaccataatactcataacgaggtttccccttgccaaaaggatctattcggcaaagaaagatcacatatgtcgctttgaattctttttccggagagccacctagcccgccatagattatttcttcctgataagcgttggcaacttccagaatgttttctcctggttcttgcgaccctacttgaattattaacccgtatttattgcgcttcttgtctcgcgcaattacatgtacgattgctttttcatctaagacatttctatttggatcatcaagtgattttgcttcctgaatatcgagttcgggaagcattctttgtactgctggaagaagctgctcattatacttcttcataattcctgcagccaagtgatccaccattgccggtgacatttcattttctaacataaaaaaatcctcatttctaaaaatctgagagttttatccctctattacttattacgcaaaaaaacgcaaaaattttttcagaaaatgaagatttttcaattttttagttttcttttctaaaaaatggactgagtagcgatacaagcaggccgtaaataaaataccagcgataaatatctgccaagtcttgattttgaatccacaaaattattgcaattactgtcagtaagccacctaaaaagattgttgaacccatatttttatcagtaaagaagctgatagcagcacctaaggtaattaacgctaccaaactataaatgacgataatcactggtcctttagtctgaacgttaacatcaagcattggtgcgttagtaaacagctgccacacgataaaaccagctaatgcaatgccacatagcaatactagtaatctaaaaacaaaagttaaagtctttttcattatttttctcctgtatgcataataatactagtataacagcaatatcgcggcatacgaaaagcgcttggatttttccaaacgcttttttactattcttttgcttgcataaattgttttctagtgatgtatttgattgatttaacgtattgccccttgtgttgaattgaaatatattggcctgatggatcgtagccgccaacctttttcaacaataaattctttttcgtcttaggattatacgccttcacattgtaataccgctgtgtgcctttatctacttgagcatagcttgtttcctgggaaatgaatggattcaatctatcagtaaaagagttatgaaatgaaaaaatgcagattactcccactactagcactagtgccgttacaaatgcggttttaatagtacttttattcataatattcaccttcatcgttcaactattgttatactaaaatagtacactcattcaatgaatttagcaattgttttcatgaaaaaaacgcttgaaaaattccaagcgtctttcacctaagccaaaaatctttttatagcttcttctacactagcattcaatgattggtgcttcgttgcagcataattagccaatttttcatgtaatgaaggatcaatgcgcacattaaaattacctttaaaaggtttctctggtataactccatcttccttacagctcattagataatcatcaatggctccttgaaaatccttctccaattcatctattgtattaccttcgtaagaaataagactcttaatcccctgaaccttaccaaaaagaatcttatcctccaaagtatattcaattgaaccttcataacccttatacttcatatattgattagtttttttcatctttattcatctctttgattttatcttgaatttgtttgatttgatatggtaatagttcttttctaggatgtggtttatgaagaatgagactgtaaaatagtttgtgtaaggatgaatgattccttaaatttatttctttaaacattagaaaaaggagttcctttctcgtatgattggtttgaacaaaaaaacacatacagaaagaagaactccttcatgaatgattttaccaaagattttgctcaagctctattcaatccagacaaaataaatgatttattgcgcaaagagctacaacaggctgttaataacttgttagaagctgaattgaccgcctttctgggctatgatccctatgccagaaatggctggaatactggcaactctagaaatggtgcttatttccgcaaagttgatacgcaatttggcccaattgaagtgcaagtgcctcgggatcgcaacggtcaatttcatcagcacacgctgcctgactacaagcagcactcggatatcttggaaagcatgattatcaagctttactccaagggcgtgaccaccagggacatagccgatctaattgaaaagatgtatggcagccattacagtccagctcaggtatcaaatatttccaagcagatgattccaaaggttgaggcttaccacaaacgcaagctaagcgacaagtttttctgcgtctatttggatgcgacataccttcctttgcgccgagaaacatttgagcgtgaagcagtctatattgccattggcatcaagcctaatgggcacaaggaggtcattgactactgcattgcgcctagcgagaacattgaagtctggacagagatgcttcaaaacatgaaatcccgaggcttaaagcaagttgagctttttctttctgatggtgttgttggcatgaaaacagccttggccaggacttatcctaaagctcattttcaacgctgtttggttcatgtcatgcgcaatatctgcgctaaagtacgcgtcgacgatcgtgaaaagatcatgaacgaattcaaacaggtgcatcaacagacaaacaaagaagaagccacagctgtcctgcatgacttctataccaaatggggcaaggtttacagccatgttatcagaagcttgaaagacatagaaccagatctgctggtcttttataactatcccaagcagatcagagcttcaatttattcgactaacatgattgaatcatttaacaatgtgatcaagcgcaaagctaagcctaaggcagagtttccaactgaacagtcgcttgatgcttttattggcattcaggcaatgagctacaatgaccattatttcaatcgaattcataaaggctttggtcaggttcaggacaccttagaatcctactttgattaaataaataattaaaaaatcaatttacgagaaagatctatttacacaaaagatttgacagtttctgaagaatgatccgatcactgccctttttaaaaataattctagatccactcgtttttcctttattatcgagttgataatctagttcatgcaatagtgttttagcatctttaaagtcaaacgttcttggatgactatataactttattaatagcttttctaatttacccacgttatcctcacttaagtatataatataatacgcgtggtgctagttaaatcgttttagttaataaaaaagtccaatcttgttagactcgacttgtaaatagtaataatagaaaagagtctgatctgattgaactgccttaagcttaagcgttttagccaccatttacaagttagttttaaagatttagtgataatttgtcggcactggtatcgtttgtatgcaccggctgagtttactcatcggcgaaatgttgatcaaattaaaactacggacagtctgattttggctttacttatctggcaagctaagacaggaattgaatcacaaagaagattctgtgaatgtttcaattgtttatcacactcacgttttaatcggcgttcacgtcagctattgcaattgatttatcagatacggcaagaaatgaataaaaaggttgacctgaatggacatttcttgatcattgacagctttccggtacctgtttgccaaccaattcgcaactatcgtgctaaaatttttcgcggttatgccaacattggttataaggccaccaagaaaatttacttctatggtttcaaagttcatgccattgttagcgatgacggttacattcttgattatgtcgtaacaaaagcatcagttcatgatgccaaggagacagttgaactgatggaaaatgcacatccatctaattactatcttcttggcgacgaaggctatttaggcaaagaactgcatcaacagctaaaacaaatgggttatgaactttggacaccatatcgtaaaaatatgacaggagctaaaaagcacaatgatcatcaattgatggctattcgcagaacaattgaaagcgacttttcgcttctgacctattacaatgccgagaacaatcgagcacgtagtctgataggctttcaaagccggttggaaattgcaattttagcttataatttggcttattgtctagaaagatttaactagcaccacgcgtaatataatatatcatttgtaactaaatttgcaactaagacaaattatacctaattcgctaaattcacgctactaaaaaagcgcttggaaaattccaaacgcttcttttgtttaatcatctagacctaacttcttaaagatatcatcaacatgacgcaaatgatagtgataatcaaatgcatcatcaatatcttccttggataggtaattcataatttcactgttttcaaccaatggcttaaactgcttttgctcattccatgatttagcagttagcttctgtaccatatcataagctttttcacgagatagacctgcttcatcgatcaacttaagcaacactcgttgagagtaaattaatccatatgtacgatccatattcttaagcatcgtttcagggaatacatctaagttagtcaaaattcgattgaagcggtgcaacatatagtcgacgccaatagtcgtatcaggcaagataactcgttcggcacttgaatgagaaatatcacgttcatgccataacgctacatcctcgtatgctgtaacgacatgtccacgcattactcgagccattccacagaggttttcagatccgatcgggttacgtttgtgtggcattgcagatgatcccttttggccagcgcggaaatgttcctcaacttcatgaatttcactgcgctgcaagccacgaatttctgtcgcccaattttcaatactagtagcaatcaatgctaatgtcgcaatgtattctgcatgcaaatcacgaggcaatacttgactagtaattggctgttgtgtcaaacctaattgcttcattacgctagtttcaactgcaggtggaacattagcaaaagtaccaacagcacccgaaattttgccagattcaacgccttttgcggcatgttcaaatcgttcaatatcacgattaatttctgcgtaccagcgagcaatcttgagaccaaatgtagttggttcagcctgaacgccatgtgtacgtcccatttctactgtgtacttatactttttagccttttctgcaatagttgcttttaattcgtgcagatcttttctgataatctcatcagcttgtttaagtaagtagccttgagcagtatcaaccacatcagttgaagtcaaaccaaagtgcacccattttttctcagggccaaggctttcagacacagttctagtaaaagcaaccacgtcatggtgggttacttgctcaagctcagccacacgctctgcagtaaagcttgcattcttagcaatcttctccgcatctgcttctggcacttcaccgagttctgcccaagcctttgttgcggcaatttctacttcaagccaagctgcatatttattttcgtctgtccaaattttccccatttctgggcgagtataacgttcaagcataaattacatttcccatggattcttcaaaacaatagtttgttcacgatctggaccaactgaaacagttaccaaaggaacgccaaccaactctgaaacgcggttcaagaatttcttagcattttctggaagagcgtcccaagtcttaacttgagtaatatcttcatcccaagctggaagttcttcatatacaggcttacatctgtataattccttcaaacttgctggataataatcaatcttttcaccatcaagttcatatgcagtacaaatcttgatcttgtcaaagcctgaaaatacatcaagcaagttcaagctaaggccattgataccagcaacacgctttgagtgacgcaatgcaacggagtcaaaccaaccaacacgacgtggacgaccagtaacagtaccatattcatgagcagtttcacgaatacggtcaccaacttcatcaagcaattcggttgggaaaggaccggcaccaacacgagtagtgtaagccttgcagacaccaattacagtatcaagacgattagcacctataccaatacctgaacaaataccaccagaaatagtattagatgaggttacaaatggataagtaccttcatcaatatcaagcatcacaccttgcgcaccttcaaataaaactttcttattttggtcaagtgcatcattcactaagacagaagtatcagttacatacttcttcattctttgaccatattcatagtatttatcaaaaatgtcttcaaatttaagtgctggcttaccataaaccttagtaaataattcattctttacttcaaggttagcacgcaatttttcttcaaaggtgtctttttcaagcaaatcacaaacgcggattccaattcttgaagccttgtccatgtaagttggtccaataccattcttagtagtaccaatcttgttagcccccttagcttcttcttgatattcatcttgcttaatatcataaggcataatgatgtgggcacgattagaaattctcaagccactagtatcaatgccactcttttcaagattttctaattcgccaaacattacttctggattgattacgacaccattaccaataactgtattgtccttggctgcaaaaataccagaaggaattaaacgcatcttgaaagtttgaccattaatatcaatagtatgacctgcgttgttaccaccatttgaacgaactgcaactgcagcatccttactcaaaaagtcagtaatctttcccttaccttcatcgccccattggcttcctacgactgcgactgctgtcatttaaaattcacctcataaaaatctctataaatattacgtatgctagtctagcaattaatttacaaataatcaatataaaatccgaattattttatttttaaattatttcatagttcgattttcatattgacaaacacaaattattcccatatagtatgtctcggtcaacaaacaagattaaagggagcagtttttaaatgagtaactactttagtatggaagcctttgactatgatgatatccaacttgtacctaataagggtattatcaaaagccgtcgtgatgcagataccagtgtcaaattcggaaaccgaacatttaaaataccggttgttcctgccaatatggaaagtgtcattgatgataaccttgctatttggctagcccaaaacgattattattacgtaatgcatcgttttgaacccgaaaagagaattaccttcatcaaaatgatgcatcaaaaaggattatttgcatctatttcggtcggcattaaagacagtgaatatgattttattgatgaattagtcaaggaaaaccttaaaccagaatatattactattgatgtagctcatggtcactccgtttacgtgattaagatgatcaagtatattaaggagaaattacctgattcatttttaacagcgggcaatattgctacgccagaagccgtacgtgaactcgaaaatgcaggcgccgacgcaaccaaggttggtgtgggacctggtaaagcatgtattacgaaattgaagactggctttggtactggtggttggcaattagccgcattaagaatgtgcagtaaatctgcttctaagccattaattgccgacggtgggattcgtcataacggcgatatcgctaagtcaattcgttttggcgctaccatggttatgattggttcaatgctggccggtcatgaagaatcacctggtaatgtaatcaaaattaatggtaaaacttacaagcaatactggggctcagcctctgaggttcaaaaaggtgcttacaaaaatgtagaaggtaagcaaatgttagtgccataccgtggctcaattaaggatactttaaaagaaatgaaggaagacttgcagtcatccatctcatacgctggtggtcgcgatcttaattccattaagttagtcgactacgtaatcgttaaagacaatatttttgatggtgataagtaattttaataaaatttttgcatttttattattttcctgttaagaatattacgataatatagtattatctatcttttttcgatagaataatataggtcgagttattgtagggtagtcaataactcggctttttttgattattttttaaaaacgattggacagagttttaaattgtgttatactagttgtcgttgatgaatgcgcccttagcgcaactggatagagtgtctgactacgaatcagaaggttgaaggttcaaatccttcagggcgcacttaaaaacgggaaatggctcagtttggtagagcacctggtttgggaccagggggtcgcaggttcgaatcctgttttcccgataagttagccgcacttcattgaagtgcggtttttttgtgtaaaaaaataagtattccctcggaaatacttatcatgctatgcccctttagtagctcgtctaaagataatctgtgtatctgaatctacatatttcaataacggtaaatcgtaatccttaacctgggccaaaacatttactttctcattgcatggcaaatcgcgtttagtaatctcgatttcgccttcataacgcggatacaaatgattatcaatcgtcacgctgccagttggtctagcataaatattatcttgcggctctgttgacaaaaacatcttttttctgctttcctttaagcgaactacgtcacgcgccacatctggacgattatgccaatcattgccaaacaattctggtatatcagtatctaaatgcagtgtaattgcaccctgtttttgataattagtaatcgattcaattgcatccctcgtaagttgcggatctcccacaaaaatgtgatcgcaatcataatctttcaattctaagatcgcagctaatgggttttcatatcgctgcttctccaacgttggcaatcctgcaaaaattggtccacgcaatttgccatttcctgaaataaaggctgctgttttcaaaccatattgcttaagccactcattcttcttttgcatccagtgtgcatcaagacctgtttcaggacgtgggtagaagttatgtcctgctgttaatttttcaaaatttgcattgctataacgcagatcatcaatattttgttgcgtaataatgctggcatttagaactatcggcatttctttggacaacttggcaataatatcagtagaaaatccatgatctactctaagaccagttagactcaaacttttaatttgctcaacactattgacattaatacccaaatcttgcagatcatctgccgtgacatctgcaataattttcaagtctagtttttgacaccaattagttaagtccgccagccgatttaaaatcgtctcactatcagtatcaggtacagctagctgagtaaaaacgcaggtaaatccactattgcgcatcgtcagcaaataattgtaattctcggacgtcaaatcgtgtcctagataaacagaaaatcctaacattcttattcctctaaaattaattaatttcttttattatctataacttaaacgctttcctaaatatcttactacattttttgcttgcttttttctaaaaaataatgttaaatacatataaacaaattaaaaagcgatgaaaaagacgagtaaataatctaattctttccagtgaattagtgctagtgtgaaactaatagaccctggattattgaaaaacacttttagcagctcactgaaacaacaattcttagagtaggttgagacgtctccggtacgttaccacgccggtggagcatgatagtgcttcatgagtcggtctattaaaatatagacaatgtgggtggtaccgcggaaaaaagcctttcgtccctgtttttttagggagcgaagggctttttctttgctctaagtacattagaaagaggacttatattatgacacttattttacctaaagattatcacccaacattaactgtgcgcgacactgaagctgcgattgtatttattcgtgaaaccttccaagataaattggcagaaattctcggtttacaaagaatgtccgctccaatgtttgtcgaaaaaaagaccggcttaaacgacaacttaaatggtgttgagcgtcctgttgcctttgacatgaaggcaatgcctaaagaagatactatcgaagtagttcactcattggctaaatggaagagattggctttgaaacgctatggtttcggaatgcatgaaggactttacaccaacatgaacgccatccgccgggacgaagatcttgataacttccactccatctatgttgaccaatgggactgggaaaagattattagtaaacaagaacgcaacaccgacacacttgaagttactgtgatgaacatttttaaggcaattaaggcaactgaaaagctggttgctgcacgctacccaggctctacttatcgcctagctgatcacgtttcatttattactactcaagaattagaagatcgctggcctgatctttctccagaagagcgtgaagataagattgctaaagaagaaaaagccgtctttattatgaaaattggtgacaagttaaagcgtagtggtgaaccacacgatggccgtgcaccagactacgatgattggcaattaaacggtgacttagtcttctggtatgaaccgcttaacagtaagattgaaatctcttcaatggggatccgtgttagcgaagaaagtttgcgtgaacaattgaaaaaagctcactgtgaagaacgtgagaaattaccattccaccaaatgcttttgaagggtgaattaccttattcaatcggcggcggaatcggtcaatctcgtctctgtatgttgctgttaggtaaggctcacattggtgaagtacaagcttctatttggccagaagatatggttgaggcttgtgaagctgacgatattaagttgctgtaattttaagatttttttacataccaaaaaagatcctgcaaaatgtgatacattccctgtcaagtagacagtagaattacataaagcttttattcctcagttgattaataatcagctgaggattttttggcttctcttattttcttttcgtgtattttttgccagtatttctcaattcgatgatttggtgcaatagggcaattcttaatattgcctttcatcgcttctttgcgcatttcaccagcagttaaaccgttaaaacgtttctgtggatcttcattaatgtagtaatctattgtcttacaaatagaatcattaagttcatcataactggccacttgaggatgaagaataactcgcatttctttgataatgccttgccagccttccattggaccattatcaatacagcagccaacacgagacattgattgcgtcatgccttggtcttctaattggttttggaaaggtgcgcgagtaaattgaaaaccacgatcactatggaaaagcggatgagcattagggtatgctttaacagcctgcttataggctgcttgaactaaagcagtatcgtttcgtttactaattgcgtagccaacaggatagcgatcatatagatcaaacacagtacatagatatgccttaggcaggttagcagcaacgacttcagtgatatctgtacaccatttttcattaggtctagatgcattaaagtctctttttaacttgttttcggccgttttctcaggcgttgtatgcttgaactttagcttctggtatctaggcttttgtgatctaatgccattgatacacatcaagcggtaaacagttttatgataaaccggcttttcatcagacatctgtcgattaactgccatggtcatcttttccgtcccaaacagactgttgttagacttggttatttcaatgatctttgcttcaatctttttgtctcgttcttcacgcttactcggcttgcgcttaggatcaaagtatttgtaataagctgagcgtgctattttagcccatttgcacattaaatcaatcttccaattgtacttttgatggcagtcatggattaactgatatgtttcttgtttccagcgtctttttattgcggcttgtctgtatcttggttgtccggcaagcacatcctttctaactgatctaatttttttaggaattcgttcttagtttgttcttctttgagctgacgctctaattccttaatttttcgattagccagttctaactcagttagctcttctggcttcttatgtctgcctcgtttatctgttaatcctgtttcaccattagctagatatttgtgtgtccagctgtaaacctgctggtaagaacaatcaaatttgacagctgtttgagtgtaattcttgtcgtgattaagacagtattgaacaatctgaattctttcttgctgggtagtttttcttcttgctttagtcatatagacctccggatggggatcatagtcccgattttctatatgactattatacttggaaacccattctgatactgttccattgcttctaatgccatatttattagctaaagaaggtaacgacattttgccagctaaatattcttgaacaaccttttctttaaatgccttagagtaatgattattgtattgagcattacttagaagggtatcacgattgctttgatattgatgaacccatcttcttacttgcatcgctccacttttacttggcatcttaagccgtttagctatttcaacgctgctcctattaccattcaagtattgttcaactgcccatatcttttgatcgaatgaatatttactttttctggacataaaaaatcccacctccatggataattgaatactttatgtatttcaatcgtccactttagtgggattgtatcaatgtaggatcttttttctattgattttatttccgttctcttctagaaatccaagccataatcaatggcaacaatacaaagccaaagaccatcatcgcaatggcataccagttaacaccgataacttgccctgctgcgtttactacaccaaattgtgccttccagttatattcaactaacaagaagatcacaatcacaacagataaaattggcacaataacatcagtcataacgctcttattagcctttaagatatcttcttttgccttaccacggtaaaattgaataactgctagaggtaccacgatgaaacctaagaatctaaccatcgcgctcaaagtaatcaagttgaccatattgtattcaaaggccatcggaatcaaaattgccaagccaacagagataaagaaagttctaattgggaagttattcttagttctcttagttaaagcttgtgacatctgaccctcacgagccatagcttccagaatacgtggagcattaaagctggaagctacgttgatcccaaacattgaaaccaaggcaccaaccaagattacatcacgtaagatttcattattaaaaatagccgcaatcgctacaacttgcttagttgtcattaaagcacgtggattaagtaccatcgctaccgctacaacgccgatatagacaaccgcaataattaagattgccaatggaattgctcgtggcaagttcttttcagggttcttcatatcttctgaaccagaagctactgattcaaagccggtaaaggcatagaaggctgaaacaattgacatgacaaaggtagttgtagttaaagttggcacaattttctgaccattctgagtcaattgatctacttgccctaggttgcttgatgcaccagtagtaattaacaaaactactccagcaataataattaataccaatgcagccaacttaccgatagtagctaaattcattacatacttaactactttttgaccaaacaagttgatcacggtaataattgccatcaagatcaaaaagccaattgtgacatttattgccttattgggatttccgccaaaaattgaaatagttgacttaattaccccaacagccattacgccccaagctacactggctgagaagtaacgcagaactcccatataaaagccaatttttttaccaaaagcggccttggaataagcataggcagcaccagatttagtgacatactttgaagctgccgcaaacgaaatggccagaatcgctgcaaaaattgccgcaattaaatatacaactaaagctttactaccggcttgctgtaccacactaccaggtgttaaaaaaatacctgaaccaataatggcattaatcgctaacagcacaattgaccaaaagcctaatttatctcctgttttttcagtcatctatttgcttccttactttgcattatcaacaacaaacttaaataagttattcataaacgctacatcggaattacggtgcaacatttcagggtgccactgcacggcaatgacattaccttgtttattttctagcccttcaaccacaccatcaggagctgttgccactgcttttaaatctggtgcaacgtctttaattaattgatggtggaaagaattaacgcgaaattcagttttgcccaaaatttcagccaatttactatcagcttccacttccatactatgagtaggcaaagttggcgtatgaccttgcatgtgtttcaaagtaagttcttttctgtatgaaagatcttggtaaagcgtaccgccatgagccacattaataatttgagcaccacgacaaatgccaagtaccggaataccattttcttctgctaactttaacaagcgcatatcaaaatgatcgcgttcaggccaagtagcaccaatcttttgcattggctcctcaccataaaaacgtggatcaacatcatgcccaccagataagatcaagccttgaacatgattaagctgttcacgaatcacctcatcattttcagtaaatggaataatgtaaggcacaccgccattttgaactactgaatctacatagtcttcgttcacataactacgatggtatcctgggaaaattcctccatcgtcaataattacagaacctgagataccgataattggttttgtcatttatgctcctccttctgcttactttttgtatgtaatattatagagaaatttatgcaaaaagtacaattaaaaatactgattgtagctttaattttgattattctgctttttataatccttgttcaaatcgatgttgttgcaaaacatattctttgaaaaacggaagcgtaaatgcaacttcaccatagttagttgacttaataatctgatcgtctaacaagcgtctacgataattagctacaaaattgcttgggcggtttaatcgttcacgaatttctttgatcgaaacacgttgttctgaactctgggccattgctaaaacaaattttttatcttgttttgatagactactaaaaatcttcgtatatgcgttttgatctaattcaactagatattctggcttaattttatctagcagattttgatcaattattttatttttttttgcactattccaaaccaaatagcccaataattgaaaggcatacgaatagcccattgtcattagcgccattttgctaagaatatcttctgttacctgaaatcctgattgtttaaatacattgttataactaacttcgatttgagctaagtttaaagcagataaagctattctttttccgcgcaataaaaaagtcattacatcttcattttgtaactcagatatattttcaggaagccctgtcatcattaaggccacaggataatcttttcgatttaataattgataataacctgcaaaatcttttaattcacgattagacttcacttcgtctaaagtaattaaaaccttaatccccttttctcttaacttatcgaacatatttgtcaaaataccttgataagtagaaaaagtaggctgacttatctctgcagaaagctgtaaaccaaaggcagaaaaatttaagcctttaatagattcaaagattttttgtaattcatttccagctttcatatacaaactatcaactaaagctgccattaaatttgatcccatagccaaatcaacaacgatccagtcaggattcttttcaactcttttgccaacctcagtcaaaaatgtagttttgccgactccacgcatcccgtaaacaatcgatatcttatacggactatttggattatttatttcattaaccacatcatcaatcaattgacctcgatgcaaaaaaacagcgggaattctaccaaaactaggattaaatggattattcattttatcacctcatcaattactctatcttttatgtttattatattatttttgtgtatctttgtgtatctctatgtatcttgaatccttttgtgtatctttatgtatctttgtgtatctttgtgtatctctatgtatcttgaatccttttgtgtatctttatgtatctctatgtatcttactgcaataaaaaagcagcaggcctctcgcctactgctcaattttatttatcttttcgatgcttaaccacataaaccagtgccgcaataatcaacactgctgcaccaactgctactgaaatttgcgtctccggattaatgaacatgaagacaacgattactaccagcataatcaaagcaaagtaatttgaatatggataaagcggcaatttaaacgggtgattctccatcaagtgcggattctttcgtctaaagcgcaactctgctagcaaaatgacaaaccaagctaccatccctggcaaaacagacgaactatagacaatcacgaagatattagccaatgatttattcaaaaattgggctaacacattaagcataaaaccaataaaaattccactagtgatcccaatgatcgcatgactaggcacgattctctttgaaacatgaccaaaagtcttcggcgcttctccttcatgtgccaatttatacaacattcgacttgatgaataaattcctgagtttgcaccggacaaagctgcagtcaaaactacaaagttaattactgaagctgccgcggtaattcccaccttggcaaaggtcgttacaaacggtgagccaatgctatctaatttattccatggataaattgtgacaatcacaaaaattgccccaacataaaagatcaaaatccgccacaatactgacttcacgcttttaacaatggccttatgcggatcagatacttcaccagctgaaatcccaattagctcaattccttcataagaaccaacaataatggccattgagaaaaagaagccattgagaccaccagtgaagaagccgccatgactccacaggttagaaaagcctactggatgaccgccattaccaaagccaaatagaattaccgcaaagccaagcaaaatcattaagataatcgttacaaccttgatcatggcaaaccagaattccaaggttgcataagctttcgcactagctaagttagccaccagcaaaaataaaataataattacgccggcaacccaatcagaggtgcctttccaccaaaagcgcaaatactctgttgttgccaccacctcagaaattccgacaacaatgtattgaaacacgtttgcccattcggctaaatagccggcaattggatgcacatgctctgaagcatagtctgcaaaagaaccagtacctggatcaacataaagcatctcacctaatgcccgcattacgatatacaaaataaccccaacaaaaatataagctagcagtactgaaggaccggtccacttaatggttgagctagcccccatgaatagtccaacaccaattgctcctccaagtgagatcatttccatctgtccggctgtcatcgaccgctttaattcaggtgctttcttcgccatttccaactccctttctttagcatctgtaaaaatttcctaggaaatatatctattctcatttatctttaatcactataccttatcattttttcgaacaaaactgtagctgatcgctaaaaagattgcaaataaaatcgaaataatcaaagccagctgcgttgatttgataaagaataataagattaaaataccaatgtaaaaggcaagcgtaagccagctagttactgggtagcccggcattttaaagctgcctaaattctgcttattctgtttgcgataaacaatatgtgctgccataatcatgatccaaacaatcacaaaacaaatcgttgaaacagttgagacaacggagaatatttctgctggcattaaatagtttaaggcaactactacaaataaaattaatgaagaggtcatcgaagcgttcattggaattgcttttttggtcaattcacctagtcttttaggtgcatggccgttacgtgctaatgaataaagtgatcgactagttgaaaagattgcactattagtcgctgacatagctgcagtcaaaacgacaaaatttaaaatccctgcagccgctgtaacaccgatgccggtaaagacctggacaaagggacttgaagtagttgtaatgtgattccatggataaacagacataattgccaacattgagcccacataaaaaaggccgattctaactggcaaagtgttaattgccttaggaatatccttttgcggattagctgtttcactagcagtttgacctacaatttctaccccaacaaaagcaaaaacaaccatttgaaatgataaaagaaagccccaaatcccagttgggaaaaagccaccatgattaactaaattagttagtgaaacataaccgccctttacatgcgtatgaagtaacaacattacagcaccggtaatgattaagactacaattgccattaccttaatcattgagaaccaactttccagttcaccaaataatccgacatttaccatgttaatcaacatcaataagatcacaattactaaagggccaacccattgcggtagccacggaaaccagtatcttaaataaattcctgtcgcagtcaaatcagccatagctaaactaagccagcaagcccagtacatccagcccgctacaaattcggcacgcttacctaaatattttttgattgattctaaaaatgaatgactttcaggatcggctaagatgagctcccctaatgcgcgcatcataaaaaaggtgataatccctacaattaagtacgacaaaataattgaagggccagcactatgaatggctgaaccagaacctaagaataggccagtaccaatggctcctcctattgcaatcattgttacatgacgacttttaagcccgcgttttaatctcggcttctcatccataattacttcacaccttcctcaaaataaaaaatggagcggcatgttttttaaatgaaacatgttgctccatcaagtttgctttttttgaattatatagtcttatgccaattcatgcaattattttttatctaaaaaagatattcccttaggaatatcttcattattagtaaactttaaattggttcaacggccagtaacgtactttaactacgccaacgatactactacgcttaatggttccgatataacggctatccttagaaacgctccggtgatcacccattacgaaatatgttcctttcggaatgcgcccagtatcctgcacatatttaatctgcgctctagtaaagtattgctggtaagtccgcgcccgcatcagtgactgcatagtaaaattctgagtctcagaataaaatgtatctgagccattatcaattaacttcgttccttgtttcaaccaaggttgagcaatctttttattattaatgtagatttgattatttttgctgacgattttttcaccaggcaaaccaataacacgcttaatgtacaaagcacctggttcatctggtgctttaacaatcactacttcaccacgcttgatttgcgcatgacgctcagcgattagccgatcaccattttgaaaagtaggttgcatcgaaggacctgatactgtatcgttgctcaagacgaagtggaaaagcagcagataggcaccgatcaaaataacccagataattaagatatctaggaaaaacttaccccatgattctttttcttcttttttctcagccattatttttctccatttatctttttccacagtttacaactttatggagaaattgccaaattacaaaaaagaggtgtaagtgtcaatgtttttgcggtagcctttaaaccattagtctaaccttaatttcttaaatatttatatgacttaaatttctgcttagcttgcttaaataactattgccagctacctgtgcggttaatgcgccatgctggatgcctaaatgaacttcatgacgcttctttaagctgtcacgggccgctgcttttaattcctgttcagtcaatacagttatttctgaatcttcaaactcgctgctaagccaaaattccagctctcgattcttgatgcagcttaagatcctaagcatgccttctgctccagattttgaccatttcttgccttgccccttaacacggtaggtatacttgcggtggttgctctcgcagcagccaatggctttagtcacagtcagttttcgtttcttaaacggcttaatatcgtcccaatgacgatcaatataattccttaggcgccccagataatcatgattgagctcggtattcaattcatcaattagtcggctttctgcagtggttaggatagttttaactttgtcatagctgtatttgtattccaaagcagaaatcagcttgccttgcaggtcaggcgcaaaatatagcctttctttgattttcttatttaggtgaaagacatccaagaaatgctcatgacgcttgcatagccctacaatgtcatcgaagtctgttttggcatatccagcaccgccatcggcgttgctaagaattacagtatcagaaagatcataagtattggccaggtactccttggcttcgttcagcgcatcaagtcggcttaaagaaacaaattccttggcattgattcgctttctgcgtttcttgcttatattgacaatgccttcacagacctgatagcgatgaaattccaaccggcttttagtgcctttgatcaccacgccatcgccttcaagatacaaaactgggacctttttcttagtgcctgcggcatcatatcttgaatctgcttcttggcccgctttaatatttttctcggccatttttaccaaattgcccacctgcatatggctaatattaaagccagacaggcaattgactgctagagcagtattgcgataagtggcaacgctgcttacttctaagatgtttttgactgctaaaatactgtagcgcttgtatttgtcaaagcccattaattcatccaagggataccttgcttgtttgcctgggcagacatatcttcttctgacatacctaacttcgccaaaagccatattgattgagcgctcattcttcttatcaatctgatagccctgtgctttaaccttggtaatcatttcatcatcaactttagctaaagccaaggccatgatttccttaatcaggtttaagaagaaacagattatttttctttcacgcttaatataattatcttcagactttataatatttgcgatttcagttacaattgaattcataaaagaccagcttctaatgtgttttttgttcttaacatcagactactggtctttttgtttgagctcaagtccaaattcaaaggacttgggcttttttaattatttattcaacttaccgtaaaaaattatacacttagaaaagaggtatttcctaggaaatacctcttttattattaatgactattaattagtcttcttttttgtcttcagttttagcttcgtcttctttaaccttttcttcaacttttggagaaatatcaaagattgcttcaccgttcaagtacaagtgcttgtcatctgcagtgaattcgatcttcttagtgtcaggcttttgtaagatcaacttagcagctggagtttcaagattttgttcaactactcttctaagtggacgagcaccgaacttcttgtcgtagcccttttctgccaagaatgccttagcttcgtctgaaacttctaccgttacacccttcttagcaagaacatgagacatcttcttcaagtaaatgttgatgatcttgcccatgtcttgttcagtaagtgagttgaatggaacgattgcgtccaaacggttcaagaattcaggtctgaagtagttttcaagggctgagattaacttgtcttggtcaaccttgccatcttcaagcaacttgtctgagaagccggcgtttgaagtcataatcaagatagtatccttgaatgaaacagttctaccttgtgcgtcagtcaaacgaccgtcatccataatttgcaataatgcgttgaagacttgtgggttagccttttcaatttcatcaaataaaatcaatgagtatggttggtgacgaaccttttcagttaattgaccaccttcaccgtagccaacatagccaggtgctgaaccgatcaacttgttaactgccatttcgtcttggtattcactcatgtccaaacggattaagtgttccttgttaccaaataattgaattgccaattgtttagcaagttcagtcttaccaacaccagtaggtccagtgagtaagaatgaaccagtaggtctgtcgctgtctttgaaaatttgcttacgagcaatagcgtcagtaattacatcgatagctctgtcttgatcaataacattcttcttaagtttcttagctaagtccaagttcttttgagcttcatcagcgtgaagttcactcattgggatcttagtcttttgttcaataattgcgtagatgtctttttcagttacttctggagtattcttagaatctacattcttaagttgtttctcaagttcagcaatcttactcttaatttctgaagccttgtcgtaatcctctgccttagcagcttcagtcttcttagcttcaagagctgagatttggttctttaagctcttttcatcagttggttgtacaagcaatgccttcttagcaccagcttcatccatcaagtcgatagccttgtctggtaagtaacggccttgaatatatctttctgataattcaacagctaatttaagactgtcgtcactgtattttacgtggtggtagtcttcgtacttcttctttaagccttccaaaatcttaacagctacatcagtagatggttctggaacttgaacagcttggaatctacgtgataaagctggatctttttcaattctttggaattcactagtagtagtagcaccaattaacttcaattgaccacttgccaaagctggcttcaagatgttagctgcatccccattgttgttttctgaatcagtagaaccagcaccaacgatgttgtgaatttcatcgatgaataaaacaatgttaggatcgctcttggccttgtcgataaccttctttaatctttcttcaaagctaccacgaagacttgaaccagcaaccatgtcattaatgtttactgaaatgatatgcatgttagccattttagctggtacattgcctgaagcaattctttcagctaaaccttctacaatagaagtcttaccaacaccagcaggtccgattaaaacaggattattcttcttacgtcttgaaagaatttcaattacgttatcaatctgttcgtcacggccaattactgggtcaaatttattgttcttagcttcctcaactaagtcaacaccaattggcttttcattgggttgttgtgggttctgttgaattgtttgtggtgcagcacccatgctgctggagtaattaattggaattgaacctgaattacctttgctatttcttctgctaccaaagtcgtcattaaagaatgagctattcaattcgttaaataagttatcaaagtcattgtcaaagtatgccatatgtgcaacactccctatctcaaatttacgtctttagcactctagcttatcgagtgctaactcattacatttaatagtatagcaggttatccacagatttcaagctaaaaaataaaagttttacacattttcctttatttttgtgatttttatttaaaaaagcactacaaatgctgcaatataaacatttgtagtgcttcacaaattataaagaatttcttaagatgggcaaaaattgatgattattttgcttaaaactgttgaattttaaggaagttttccacagataagaataagtttattaccataaactatttctgcctacctctattattgcccttttgcttgtccagtattttgcggttcgctcaactttctcggctcaagcaaatactgtttaattactttgattacctgcttattctgaggtaaatccgagtgatccgcttctacacccgttactgtcattgcagtatagctcttgacttgattctgaaaaatatattttccggctgctacgctagcttctggtacaattccatcagactcataattttttccaccagataaggaataaacaatcaagtttttcggtagtttatctttgttcttgataaagttttctagcatttgcgttttatgattaatatttttttcaccaaaattatatggcgttcctagcgtcatcagacgtttgattttaatttcatcagaatagtaacagtagtaatgttctaaccaataggtccagatcaagccaccgttagaatgcccaaaggctttaaaattattaaacttgtagctctctgataaggcataaaaggcttgatcaaaccaactagcttgcttcttaatattgctataaccatcgtgattattttcaaaaccaacaataatgaaaggctcattgtcgtttttattgattttgcctgaatatgacagcgttccattcgttgaaactttaattttaagcacgctatgcttagtcggtgtgttctgatttagctgcttcactaattggttaaaacgttcagtcgttgcactagaacctggaatcataattactggtgacaaaagcgatttgcgtctttcagctctagcgtggttatcagccttcatccaagaataacccggaatagccaaagctactaataagactaagacgattgccaaccatttaaaattaggattttgaattaaattaatcatttttttcttcataatcctttagtcccctttcaagtcgcaaacctaatttcatagttggaataaacattattatatccaaaatgaataacaaaatagaaaataccaagttgctccagtcaccattggaaccaaagaaagagaccaaaattcctggtgtcccacttaaaacggggtaagcacaaggttgaattaaatggcaaaaaattgctccagcggctagtagaatattaataattggaataatcacaatcgccggcagtaacaacggatttaaaataatcggcatcccgaccatcatgcctccagttgagccaaaagctgctggaagcaggttaaccttggcaatattttcactatccttatttttactataaattaggataattacaatcatcgctaaaacaatactcgcaccacccatttctgcataaggataaaacaaagaactacccaaatacttatatggtacattccaagcactcccatgttttaaggcaaaatttaagttagctgctgaaatactattagaagtagttgacaaagaagctagaggataacctattcccatccagctaagtaaaaagactgggatagtcagtaaagctattaacaaaatattatttgattcctgtatttgagtaactaggcctttaaaagtactagaattcaagaatttgatttgaaattcataaattataatccccagaactatcccacaaaaaattgcaaatattgtcgggataaacgcattccaggctctttccttaattctagcggcatgttcaaaatcgactggcttgtgttcctttcctagccaatgaaaaatttgccctacaccatagccaattaacaaggccagcaagacagcattaatttttaaaacactggaagaaaatggtgaatgatcgctggcattattagctaaattattggcataagcacaaaacatgataacgatgacagccgtcatcccggccatggttgaatctttacggtataaacgcgcagtataacgtgccgcaaaataagccgcataaataccaaataagccgaaggttacccgaaccatcccctgactgacaaatgctcccgcataccaaaaacgatctggcaaagtgatatcaaaattaaaaatattgtaaataaaactatcgggcgaaaaaacggcatctctgaacaacttaaaatatgccccaattaccgcgatcggcatcagcataaccagcgttcgctgaaaaattctaaagattgccaatcttcttagtttaagaaagatatttgtgattctgtttaccatggtattttcctttacctatctattctaaatatgattgaataaagttaattaaaacaattattaattatacatctatactagaaagctgattatgatggcttacattaacttaaaaaataatactaaaatttaccaatctggtgacacaaccatctatgccaataagaacattactttttctatcgataaaggcgaactagtcattattctcggctcatcaggagctggaaaatctactttgcttaatattttaggcggaatggaaccaaatacaagtggcgatgtaattgtagcgggaaaaaatattgcaaaatataacgctaaagaattaactacctatcggcgcaacgacgttggcttcgtttttcaattttataatttgattcccaacttaacagcaaaagaaaacgttgaattagctgctcaaattgtccctgatgcgatgagcgccgatgatgccttgcagtatgttgacctagggcagcgagaaaacaattttcccgctcaactatcaggcggtgagcagcaacgtgtggcaattgcccgagccatcgctaaaaagccagccttacttttgtgcgatgagcccaccggtgcccttgactataaaacaggcaaacgaatcttaaaaattttgcaaaatatgagccggcaaaatggctcgacggtcttgattgtaactcataacgccgctattgccccaattgctgataaggtcatccgtattcacgatggaagtattcaaaaagtccagcataatctacatcccgctgatattagtacaattgaatggtaggtgggcgacatgcaaaaaactattctatggaaagatgcttggcaagcaatcacccattcacttggccgttacattgccattattctattaattgcactggggacttttgcctttacaggtttaaaaatggctggtcctgatatgcgagcaacaggggcagaattttttgccaaacataacttagctgacgtcactgtcacttcaaactatggcattaattcaactgatcgccttactattcagaatttaccggaagtaaaagaagctacttttggctattttcaagatgttaaaattaaaaatcaacctgatacgctccgcatcttttctcaatcagataatctttcaagttatgaattgattaaaggtcattttcctaagaataaaacagagattgcactgtcatatttattgcagaaaaaatatcgcttggggcaaaacattacttttaataaacctggcattttaaaaaataagacttacaagattgttggcttcgtcaaagctagtgagttcttagataaaaatcaaatcggtcaaaccaacattggcagtggtcatttaactggaattgcggttgctaatcataacgccttcgccgcaccagtttatcaaattgcccgaatcattttcaaaaataccgccaatttaagtccctttggcatagcttaccgcaaccgtgtttataacgatcaaaccaaattgcaaactgctttaaaccaaaatcgagccgacaaatatgacaaatatcgggccatgtatcaaaagcaatatcgacaagctgcagctaaacaattacttaaacgtggcatcgtagttaacccggcgcaaatcaaagtaccacagaacaagcttaaaattgcttatcctaactacgtaatcaacagccgtgaagaaagtcagggttatgcttcttatcgagcagattctgaacgagttgaagttttggctaatgtctttcctgttttcttgtttgctgtagcggctttggtcagcttaactacaatgatgcgttttgttgaagaagaacggactaatattggtacgctaaaagcactaggctatggtaatggagcaattgccattaagttcttgctctatagcacctcagctgcaattttaggtgttattctgggggctagcttaggttacacctttttgcctaacttaatcatcaaggcctatttagctagctcaaccttaggaactgattaccagctgaattttgcttggggaccactattaatttcattgacgattgcactacttgcaacaaccgtcgtttcaatgattactttagctcaaactctgcgtgaacagccttcagctttacttttacctaaaccacctaaaaatggttcacgtattttactagaatatattccatttttatggaagcacatgagcttttcagctaaggtaacagcccgcaatattttccgttataagagcagaatgctgatgaccatcctaggcgttgctggttgtactggattactagtaatgggatttggtattcgtgattcactacacggaattggcaatattcaatattctgaagtacaaaaaaatgatgtcatcgctttgaaaaaccgccatgttaacacgactgagcgacaaaaattaaacaaaatttttaccagccatgatgttacgcaaactactgctgtacaatatcaacaattgactaaacaccttgatagcactggagcaactgaaaatgtaatgctaattgcgccacaatcaactaaaaactttagcaaatctatcaatttgcaagaacgtcaaagcaagaaaaaacttgttttgtcaaataatggtgtagtcatttcagaaaaattagctactatcttgcacgctcataaaggttcaacaatttccttaaaaaatgaacatgggaaactacttaagttcaaagttagtggaatctgcgaaatgtatctcggtcactatatctttatgagcccagctgaatatgccaaagaaactggcaaaaaatttactactaatgcctatttagtaaccatggccaaacattccccaggaaatatcagccatattagtcaaaaaatgatcaaaacaggcgcaatcgaaacggttgtctcaacttcatcaaatagaaaattgctgagcagtttcactggtagtctaaatgaagtcattctaatcctaattttaatttcagggatgttggccttagtagtcatctataacttaactaatatcaatgtcgctgaaagaattcgcgaattatcgaccatcaaagtgctaggattttacgataatgaaacaacgatgtacatttatcgcgaaacaatcatcttatcggcactaggaattatcgtaggctttggcttgggttggtggctacaccactttattatcactagtttgccaccagatgtcgcgatgttcgatccgaatatgtacccgttgaacttcgtcttctctgcgctaattcccgctattatcaccgctattttagcaattgttgtccatcacaagatcaagcgaatcaacatgctagatgccttgtcctccattgattaagcgctgttatgctataataatcactatagaaaagggtggaaaaaacatgccaagaaagcactttgaattaaacagtgatgttaataaattaatcgaaaaatatgatgaaattaataatgttgatttcaataagttagttaacaaggccttaagattctaccttgttaatcaaatgaactacaaagatgttcaagacgctctgaataaagctgataacgaagcttctaagtatattgatgaagcaatgcgttccagcatgggtgatattaatcgaaattattagaacataactaatcatggaaaaagccatctgttttgacagcaggtggcttttagtattcattacaagataatttattataaaaacaactaattgataatttctttactcaaaatgcttataccgataatatcgataacctatctttttaccaaaaatcgtctccgaagttttcatccaattagccagcaaaacataaatgcctaaaaagactaaaccgaagattgctaaataaccaaaactaccaacacggcctaagtcgttgaaacgatagccaaataaaatttggtaaacaaagagcaggataatgtaaatctcgtttgaaacaatgatcggcaacaaactccccatcttaacgccatatgtcttattaagcttgtgataactgagccaaattaccagtaagaacgaaatatcagttgaaagaattgcaccatccgcattcatgaacatagtcatcggtacttgcagaattatttttactaagacaccttcaaccatatagatcacagccagtttgttcatgttcaaagctaaaagcagtgttaatgaattcatcaccaaaccagcaaacaaactttgaacaatattttcaaccaaataatacgcacctaaactatcgtgtgagaacaagaccgtataaattggagaagccgcaaaagcaccaagtgcaacaaccggaagcaagacaaataatagtagtctatagttctctaaaagcagctttctaatgctttcttgactatcattagccttatacttaagccctgctaaaagcggcagactagtctcagaaacggctgtcgcaagtgaaataatcaccgtggtaatcttgcttggattagccgagaaaattgtgtacaagtaactaacatagcttttactcatatgactgaggctaatcaggatttgtttaaacaaaagttgatcaactaattgcgtaacagtaatgaacgatcccagcaaaacaaacggaattgaggcataccataagttaagcaaactacgagaaacattattaagtgctctgggctcgctattttcaattaattctcggtaatgtccccactgcttgcgcatatatgcaaaaagatacaggtaactagctatagcaccaacacaggcgccaaacacactgaaataaaccgccgttacgtaatcatgatggaagacttcaataatcaacaaagtagccagcaaaataaacaaaattcgagcaaattgttcccataattgggaaatcccatatggcttcatatcattatttccctgaaaccaacctcgaaccatactcattgatggcagaattactacggctggcactaatactcgaatagaaattgttgcactagccactgaatccactggactatttttggcaatcattggtgccgtcacataaagcaaaataccacacgctattcccatgaccagcataatagcgaagcctaatttggtaatgtacaaactgtctttatatctattttgcgaatttaattgcgatacttcccgggcaataactgaaggaagtcctgccgtcccaattgataaaaacagcgcatacggcgtatatgacgaattgaacagcgcctgtgcgtttaattggttgtggtagcttcccagcataattagccaaggaatcaaataaacaaccccgagaattctagatacaatgctaccaaacgatagccaaaatgaaccggataggatttttttattcaatagaatagcctcaaatctacgttagtttctcattgtgccttcttattatacgtggattttataactttgtgggaaatatgtaccaactagttacccttttttaacaaattttttggctctaataatacaaatcagttacattatttactatattgttacccagcctttaattttacgttagaccccttgacctaaccttctttaattattatccttaaaatgtttctgttaaagttcataattagacaaaaataataatgtattaagaatattcatcgggggaattaagttgtcattcaagaaaaagattatcactaaattagcttatgttgctatgctttcaactactggcgttgccgcagctgcaatcgtgcaaccacaagcacatgtccaagcttctaccacttcagttgctgctcgctcactcggaatcgatgttgctagttaccaaagtgctgatctttcagctcacgctaaaagcggtgctaagtttgctgttgttaaagtaagtgaaggtaccagctacagaaatcctaaggctagtgctcaaatcgctagtgcccgcgctaagaatatgatgccaatgggctaccactttgctacattttctgctaatagcgctgctgctaaaaatgaagccaactacgcaatcgcatcagctaaggctgttggtcttggtgctggctcataccttgcatgtgactatgagtcaggtgacggcaacaatatctatggtggtaagaatcctactgctaatgcaattaatgccttcatgagcaaggttaaagctgctggttacaagccacttctttacgctagttcatcagttttaagaaacaacattaacactaactctgttgttaacaaattccctaactcattatgggttgctgcatacgctgtttcaggtcgagtagacaatcctaactttgactacttcccatcaatgaagggtgtttcaatttggcaatttactgacaactggcgtggtcttaacgttgacggtaacattaacgttttacctcttacttcatcaggtagcgctgtttctcaagcacctaagaaggctcgcgtattaaagaagaaggctcatgtatataacaaggctggtcaccgtacaggcaagactattaagaagggcacttctatcactacccatggcaagaagaaaactatcaatggtaagaaatactacaagattgccaagaatcaatacattagatcagctcccctttactaaaaaggcaaaataagtcatcaaaaaatgcaccaggtagaaattacctgatgcattttattttatccaattttttacttggcgaattgttcaccagctaagttacggtagaagttagccttagcttgacggtaatatgggttaacccacaataaaccgatcccgcaggaaataataccaagtagccaccagccgatgaaacttaaatcaaaaataaacaagtccatcttatggccatccatcaacttacggctggcactgatagcttctgtggcagtcggctcatgaccactatctagcatgtcacgcaagatatatggtgtcattgcatatgaataagccttgatcagccctggaataatcagtaaccaagtccacaaaataagaaaaatttcatataaaatataagttaaaaagttactcttaaagtttctggtaaatggactaaagatacctgaaagaacattttccttagtaccactatctctaaaatgcaagatagtataaattacgccccatgtgattaagccaattgcaactgaaactaccaaagtaatcagccatgcaaaaggattaactcttactttatctaggtacatcaattcagcattgttaccgaagcggcggacaataccgtacacgatatcttcgcccttttcaaaaaagttttcgatatcggtcaaaatataaacgattagccagccaacaaatgacagcaaaactgcccagccccagttaccacgtaactggtctctagcttgttcttttaattcttttcttgtagtagccattttctctcctcctcacttttctaatcatgagtattgtcgcctaaaatcagggcagaatcaattaaaagcacatcaaaaaagcctaattccaccaacatcggaactaggctcacacagtgttgaccgccactctgaccacatatagaagataacattttcgctaccggagaaaatgactactaatagcgacggtacatgatagattttagcattcaactacctaaaagacaagcgaaaagacgtgttgaattagcggaatggataccaaaatttacggataaaaaagacgaggtctaaacctcgtcttcttcattactaaaattcaagcatcatcgtcattgcacgattgatcttctttttaatctttttaaactcaccagaagcagtatgattatcctgcaaaatgatcatgttctggccatctttagttgcccgcataaaggtataatacccttcaccagcaccattagcagctttataatgctttaaattataaagtccaccattgtaatagctaggagcctgacccttgaacagaacttttctactcttgttagtcaaaatcttaccagcaagaatatactgcatggtcttagctaaatctgcgttagacattacgattgaaccagcacccagctcattgtgagcatccttaacggctttagcatggttcactttgacatattcaccctcacgcatttcatagcctggtacccaatgactagccaataacttagccttgtctgaccacaagaactcactatgggttagcttcagtggcttgatatatgtgtcatggaacaattgctcgtatgactttttctcaagcttggacaagattccacaaaggaaaatatagtttactgaagtatagtgccacttacctaatttgctagcatcaaacacagtatattgtgcatcatgcttgatgttcgcttcatcagagataaactcaggcgtacctaattgttgaccagctttcaaatccagccctgatgtcatatcaattaagttgctaatcttgactgaactagcaccatctacatttgggtagaattttgaaagtttatcgctaagcttcaactttcctttctctacctcatgcatcaccattgcagctgtcattgacttttgaactgaattgatcaaatagctagtgtcaggtttattgtccgtcgcataattaagcaaaactttgccatgatttattactaaaactgagcctttaacgcccacatggtcaatagcctggcgcactattccgcttttaaacggtctttattgcttaaatcaactcgcttaacgttatccttgttttgccacttcttggagtagaagtagttagacatatcatagtcataacgcttattaggttccttcatgaatggacgaacagcttgatcaactgcaacccagcctttccagcctaggtgaatagtatcttgcataaagtacttttcattgcctcgtcttgaaagatctgcaatattttcaaagccttgactggttaactggtgttccatcttagcaacagactcttggtacatcttgctagataaaccagtgtacttcatccacttgccattaattggtgggatgataaatagcacattagtgtgttgcttagcaaactgctccaacatcaattggaaatcaccatattctactgaatgtacatagtcaaaatcacgctgactacccttcaagcgtttcaataccttctttggtaaacgtgttctaaagaaggtattatcaatacctaagttgtttgagttagtgtgtatagcagcttgctctgctgcaaccttattcaaagcagctacagaatacttgttaggtaaaaccttagctctcttttgaatcttatttacacgatcacgcaattggaatgagctgaagaaattatcttcgttacgcaacattcgacgacgattttgtaaataaaatttttggaagctagtcaacttcttgccttgagcaatttgcttcagactattcttgatttcaccttttacatctggcatttccaacagacgtttagctgcataacgatcagttttattattcttggcactaagcaagaaattacatgcttgcaatggtgaataatacaatgcaaaggcattaggatcttgaccccgcttagtaaaccattgtggtgaaatgatcacaacagccttcttgtttctaagctgcttagctgttccttgcatccccaagaactgagccaaagattgactacccggtccacctaataagaatggacggtagtttctatgatacttttccgcaattacactagggtgaagtgggtcgaatcttgacaactcacttgaaccatagaatggcacgtagccatcttcaaaagcttcctgcttcattgtgctgcccttgaagacagttgtgttttgtgaagctgcagcctcgtaaatcgtttgcttagaaaaagttctttcccaaggaataaggaaaacaactaacaaaaggataaaagcgcaaagaactgggccaaagatttgccacagccggcgtttattactcattttctaagctttccacctttgccacaatcttgtttggagtgtcccattcttcacggttaaattctgaaacaggaacatcaatatcaaacttttcttgcaagttcaaaagcatttgtacacttgccattgagtccatcaaaccattgtcaaagatgttttcatccatttggtctgataaatcttcaccagttaagtcatttaaaatatctaatacgccttgttttgtatccataattaatacctctcaaaaaacaactcaatacttattctacttccagccgaaccacagttgacttaggaaccctgagaaaatcaagaaactgaaacatactacattgaaggttaagaaaatggcgaaccatttagtaaacttgttagatggaatttgcttcttatgctttctcttgaatctaagccacatatcgttgatacaaatagctgaagcatggaagataccataaacaatataataccacgttaagccatgccagaaacccatgattaagaacaacaggaagtaagaaacttgtgataatctaattcgattcttaaacattttcttcttcattgcaaagaaagtgaatcgcatgtagatgtaatcacggaaccagaatgataaagtaatgtgccaacggttccaaaaatccttaatgttcttagaaataaatggcttgttaaagttcattggtgtatgaattcccataaagtatgagattgatacagcaaacaatgagtaacctgcaaagtcaaagaacaggtacatactgtagcaatacatgtaagctacaagccaccatgatagcttcaagccgccatttgcattaccaacggctaaagcagcagcactgatctttggtaacaaataagtgccaaagaaccaaccaatcacaaatttgtataaaaagccttggactaagtatctaacagcatactgcatatctgtaatgtatgcatcacgcgtaggtaccttatcataatcttttttaaatctgcggtaacgatcaataggacctgacgaaatagttgggaagaaaagcaagaatcttgcgtaagtaacaggatctactttcttaattgccccatcacgcatttccataataacttgtactgtcttaaaggttacgtatgagattcccaagaaaccaatgacaaagccaattgagttatcaggaaaagcgatcaaatatttaactacggctaatggaataattgccaaaatcacagccaaactaaagatccaagtcttatttttaccgtggtgacgataatactgataagcaaaggttaaggcaaattcgtaaaccaaccagattaacaggttaaccccttgctcccagtgatcaccatcaaaaatcaagaacaagaaaacaattgaaaaaattgcttcatatgtcttgagtcgatgaccgtaatatagcccaatgataattggaattaatgcgatcatcaaatagatgaaatattgcggattagaataaggctgtaagttaatgaaattaaaattcactacttattaacctccttaattaccgccttaatatctaccttaccgttttgtgaaataggtaatgcatcttggtagatgtaacgctgtggaatcatgtaaggcattatattcttagctaagtcttcacgaatcatcttagttaaagcagcttcagaatactgacgacgaacgccttcttttaattcgatttcggcaacgatctgcttaacagtgtggtccttattgtacttaggagcagcaacgccataacggacaagcttgttcttagttaagtagaaattgatttcttcaagttcgattctgtaaccattgaacttgatttggaagtcaattcgaccgcgataaaatagcatatcgccatcaaagaaaccagcatccccactccggtagctacgatactcagcaccatcttcatggaaaaaggcagcttcggtcttttcaggattgttcatatatcctttagaaacactaggaccactaatgataatttcaccttcgccaggcttatcacccttagaagtatcaattgtaatcttagtgtcttcttttaccttaccgattggcaaacggtcatactttttaagaacttcatcagtaatttcaacttgagtaacagcaactgttgtttcagttggaccataggtgttgaaaatatgactatctgggaactttttcttaagcatctcagcttcactgtgtggcaattcttcaccacagaacaagaaatgacttaagtctggatggtgttctgcatcaaaagtcttgtccaagaagcacatctgtgcaaatgacggagttgatacccaaacattgaactgcatctttggcaaagtttggaataatttaccaaagttttgagtaacatcatgaggcaaaactaccaacttaccagcagaaacaagtgctggataaagactcattactgacaaatcaaatgagtaaggtgcttgtgccaagaaacttggatgttctggcaaattaaagtctgacaactcccagttaacgaaactaagcaaattgtcgtgactaatttgtacacccttaggtttaccagttgtacctgaagtaaagataatgtagtagttctcatcaccttcaacgaagttcttctcgtcaacttcaaaattgtcgtcttcaacttcgctagccttaagaaccttaacatcagttaaatcaacttctggtaacggatcaatttccaaaactagtggtgacttagaaacgtcttgaatcatcgttaaacgttctgcgttagaatagctagcaattggaatataagcgtgacctgacttaacacaaccaagaaaactagcaatcatttcaaaagtttgtccgccccaaatcataattggagcatgctctggaatatctaagctagcaattttatgtgcccacgcatttgaacgctttttaaggtcaccatatgtattagtttcaccgagatagtcgtaaacaacacgatctggttcgtttgcggcgatctcatcaattttcttaataacatcttgaatcatgtgatagcacctaccttaaaattcattataaatgaagtgaacagatgttagtccactatattcatataaatagataagagccatcaggattccgaaataaacaattgttttcaaaacaaacataccaatacgtttgcctcgagaatcaaccttcgtctttttattcattttttctcccttaggtaatcttatttttgcctttgccctatattactacaaatagtggcaacaaacgcactaacagcttatattttaacaaatttaaactttttcttaaatcttcagttatttgtttcaaattgcgaatgcgttttctttactgttgtctcttgcaatcccgataagcaaaaaataatggaataaagataactattgccacaaaaatcaaagcaaagatcattaagcgccatacattctgtggtttagtccacattttactctttgccgtcgccaacaaaaatgccgcaaataaagcaataacaattacttcaaccaggcaaaaaattaaatgagtattttgccagagatataagtaggttgttgccggaaataaacaaaaccaccctgaaaagcgtaaaagaaagatttcttttttacgataatctactttcattatagtttcctttcctcattaactgccaaataacgcattaatattcaccgacaaaatccggtccataactacaatttctggtctggcgtagatcttagagcctgattcaaacacacatagtagttgtcccttataagcggtaatttgctctaaatatggcggcatggtaattaccagttctgcattcttttcgtctaaagcatttaaagctgaagttggaaaaacgtagagcttggaatcaccactaccataagattggctcaaaaaaattttattttggtaaattgcaattccttgaatttgcttatccattgaagtttcgccagttggatcggaccattgcagcgttccggtaacagatttaacttcattattagtaattgagccacgatttttaccactacgcgctatagtgtaagccgcaacttttcctcgaccatacatgttaaaaaagccaacaaacaattgaccatcataatatgtaacggtcgatgctttttcaactgcaggaatggcaatttgatatttatacttaattggtatttggctgccctctttataggtccttaattctgccattgaaaatgctgctagcgctgaagatttgcccattgagccagttatccagatgtttttggctactggatcataagcaataccacctaggtgtggccgaccaggtatttgaatcgttttaagatatttgcctgtcttcttatctaagacataaacaaccgaagcatgctcatgttcactatcataagcagttagcaaaatatacttacctgcaaccgtaatcccctgtggtgtcattgcagttgctgtattgacctttttagttttaaaatcataacttttagtagcaactaatcccggcaaaacaaagtcttttccatcccacgtccgcggtggtacataattggcaactttattaataaaaggatatttttcacgcaatgctttttggtaattggcaaaattatgccaagcaggactagtgcttgtcccatccttagcaattttttcttttggccgttgacggatcatctcctgcttctgccaccattggtaaccgaaatagcctcctgcaccaatccctgcaagcaaaagcagtactagcaggaagcgcaaaattcttttaccaatttttttcaaaaaattactcccttctgtttaggaattgtccctattatgcaattcattataacgaaaaaacaattactttttgtttttaactccttgctataagctttatttactaaaaagataaatttttttgcaaaaaagtgctttcgtcacacttttttcacaaattaaggttatactagtaaatgtagtgaggaagaataatcctctactacaactcaacttttttgtttttcattcatactcctccaagtaaataatgaaaataaaaagaattgacttactccaattagtcaatttcatatctatccctttcggctcacgtgcgttgcgtgagcttttcttataccttaacttcttctcaagcaaatctttaccttttcataataaattgaacacttttacttcacatttacccagtattatataaatcgtagcaagatggtagaaacttgctacaatactcccacttttttatttcattcattcttactcctccaaagtagatgaaactaataaggtccgcaaaaacttgcgggccttttcctttttcagcacttttttctgtataattaaggtagaaatgaggtgccgctatgttttcaccatcaatcaaacatttaatagaagaaaaatctggttcatttttaatccctgctagccgaattgcctttgtccaagcagacaatcctctttatcatgcctttttgattttgactaaggttaaatattcaaaaattccagttttagataaagaaaaacgagtcgttggcctgcttagtttggcaatgattacggacaagatgctgacgactgatgagatctccactgcccctttagataaattaaaggtcgaagatgtaatgcaaactaagtttgataaaataaacttcgttgaaaccaccctagaaacgcaactgcatctgttaatcaataatgctttcttgcccgttgttgatgatcgcggcgtgtttcagggactacttactagacgcgaatggattaaggcatttaactatgtagttcacacttatgacaaacactacgaaacaaaacgaataaaataacctccaagcagcctttaaggctgctttttttaactccaacatttattgagcaaaaatgtgtccagaccaataaagaatgttagaattaagcggtagacagatatgtttgtatttttgggagggcaatgatgaaaaatttaaaacgtcaatggaagtttattgtcgttttgattgctggtgcagttggattaattagccaatttgcattgcattcaaagagcctattctcaatcgggaatcttcaatttccagttcatgccatcattattgatatcattggtatcttgatggcaatttctttactattggaaattttccacgattggaagacaggccgttacggcgtagacatcctggctgttatcgctgttgtttctaccatattgattggtgatgtatgggctgaatggatgattttggtaatgatgaccggtggtgaaacgctggaagattacgcaactggtcaagccaacaaggaattacgtgccttgcttgataaaacgccacgtatcgccaacaagttagttgacgggaagatcaccgaagttaaggttgatgacctgcaggtcggtgatactgttttgatcaagccaggtcaacaagttcctgtcgatggtcaaatcgttaagggcacttccagcttcgaccaatcttcattaactggtgaatcagttcctgtgaccaagaaccctggcgacgaattaatgtccggttcagtgaacggtgatgtagcggtagagatgaaggtaactaaggctgctaaggactcagaatatcagtctattgttgcgttagttaagtcttcacaagctcaacctgctaagttcgttaagatggctgaccgttacgccattccgtttaccgttatatctttaattattggtggtgtcgcttgggctgtgtctggggatgcaactcgctttgcggaagttatggttgttgcttctccatgtccactgttgatcgctgctcctgttgctttggtatcagggatgagttcaatgtcagctcaccatattattgttaagtctggtccaaccctagagaagttggctcgcgctaagacctttgcttttgataagactggtactttgactgaaaaccaattgatcgttgaccaagtcgttactgatgacaaatcatttgatcaaaaagaattgcaaagcttagctgccagtgttgaacaacagtcaagtcacgttatcgctagttctctagttaaggctactgacaaggatttaattcatcccgtaactaaccttaaggaaactaccgctcaaggtgttgaaggtgatgttgatggcaaacacgttaaagttggtaagttatcctttgttgcgccaggtcatgaaaaattaaacgtcacttcaactgctgtttacgtttcagttgacggtaagtttgctggttacatcactttgaaagataagatgcgtccagagagtcctaagactattgaacgtcttcgtcgtcaaggtgcagaagatatcatgatgcttaccggtgaccacaagcaagtcgcagaaaaggttgccaaagaagccggcattactgatgtccgctcagaacttttgccatcacaaaagattcaagctattaaagatgtgccaaagcacctacgtcctgtcgttatgactggtgatggtgttaacgatgcacctagtctgaccgctgctgatgttggtattgctatgggtgctaagggtgctactgctgccagtgaaagtgccgatgctgttatcatggttaacgatatttctaaagttaacgatgcagtcgctatttctaaacacacaatgaaggttgctaatatcgatgttttaactgcaattggtgtcgttattatcattgaattgattgccttcactggtgttatcccagccttctggggcgctattttgcaagaagtagtcgacatgattacgatcagcttaggtttacttgctaagactaagccaagtgataagcaatttggtttggaagaaaaatagattagatgtgaagaagctccagaatcgatttggttctggagccttttttcatacataattatgcgtagcactgcaccagttcaatttgcatctaagttaaaaaactattaagattaaactcaactaaataatttttagtggttgggtttttatcacaataaaaactttcaagattcgcttctttgggtcaggaagcacttgaaagttttttgtttttttacagaaggggaaaatatgcattttttaggacaacttatcttaatcctcttaactacagttttgctggggcaattattcgcccgcttcaatatgcctgcagttattggacaactattatcaggaattttactgggaccagctatcttaaattgggttaagccaaatgatatcatcagtctattctccgagttcggggttattctgctgatgttcttagctgggcttgagagcgatctagatttattaaaaaaatacttcaagctaagctttactgtcgccacagtcggcgttatcctacccgttgttttcatgggcttagccagttacttctttggcatgcgccctcttgaagcactctttatcgggattgtctttgcagcaactagcgtttctatctccgttgtggtgctgcaagaagcacaccaactgcacacccgtgccggcacagccattttaggtgctgccgtagttgacgatatcttagccgtggttgttctgagtctattcactacattcagtcatgaaggtggcaagagcggcttaactaataactttttgcttaatatcttgattgaagtagtttacttcgtagttgtttggctgatttttaaatttgttgcgccatactttatgaaagcttctgaaaaaatcgacgttgactattccgtcgttatcggttcattggttttagccttaaccatggcttgggccgctgattttgttggtctttcagctgttgttggtgcatttttcggtggtttagcaattcgtcaaacaccacaatacaaagaagttcactcctctgtttccgcaatcggctactctgtcttcatccccgtcttcttcgctgatatcggtctttcaatgacttttgccagctttttcaaggatatctggttcattatcgttatgaccgttttagctattttatcaaaattctgggccggaaaatactccagcgaaatctttggcttcaataagaatgaaggcaatatcgtcggtgctggaatggtatcacgtggtgaagttgcactgattgtagcgcaaatcggaattaaccaccatctcttccctgaggatatttattcaagtctgatcctagtaattatcgttacaacagttatttcaccatttattttgaattactttattaaaaagagtcaaaatagtacggaatttatgtagaaaaagtctagcattcgctagattttttaatagtttaattttacaagtggcttatcataaacgcaattgtgtctacatggtaaaatcaatagtgagaggtgagaaatatgttacaaactccaaacaatattagagctgttaccgctcgtgacctgcgcaataattttaagaaaattgctgatgatattaatgactatgatactaccgttatagtagctcgtcccaaagataaaaatgttgtgattatttctcaaaaagaatatgattcatggcaagaaacttcatatcttctaggaactaaagctaaccgcgatgcattagctgaagctaaacaatcatttgaaaaccaagatcaacgaaataaagttttaaccccagaagaattcgaggctttaactaaagatgacgaagcttaaccttaattttaactacaatgcctggaatgaatatcttgaatggaaaaaagaggataagaagacttcccaaaagattgataattttattaaagaatgccaacgccatccttttactggaaaagggaaacctgagccattaaaagcgaatttaagtggtgcatggtctcgacaaagtaatcataaagatcgcatggtttattcagttaccacaacagaattacaaatatggcagttaaaataccattattccaaatgaaaaagctctttcgagcttttttgtttaacccaattttcctaaatcgattacttggtcatacttctgcaactcatttgattcatagtggtgaattacttcaataaaggtaaggtttgagtttaacaagtaattatgaatttgatctgatgtcttcttatcaagggatgcattaatttcatctagtagcaaaatcgatctatcggccaaaattgcccgtgctagttctattctagctagctgtcccccagacaattgatccgcattatcacccaaggaatagtcccagcccttttcagcaataatttgatccaaacctaatttttggcacacctcgctcaccttttcccgggaaatatttgcacctaaagttaaattaaaccacaaggtatcggcaaaaattactggggactggctagcataagcgaataaatctgtaaacgagcctggcttttgctttttgtcgttaagcaatatttccttggcatgaccatgctttccggttaataggaattgtaataacgttgatttacctacaccagatggtccaataactgcaactttttgaccttttacaactgcaaagttaatttgattagctaattccttgccttttctagtaagatccagatcttctatttgcaaatttgcaaaattataattggtctctttcttttcaaccttgcccttggcaatatatttttctgccttagcgacaattttcttagttgttgataatttgtttcgatcttctaaaatagtcaaaattggattaagaaatgaatttgacagttgaacgattgcaaataaggcacctaaagtagtttgacccttaaccaccatgtaaattcccactaagaatggggttaagaacgtaaataaactagcaatcaagttaatccaagaattagtatctagattgagtaagttcattttacgcaaagcatcttctaattgattgatcaaaacttgatttttcttaaccgcattatcgcgcttgttgtataaatttaatgttgtgctaccagccagaaagtttttaatatgactaacatatttatcattagcagttgtccaattttctgctgcagtttgaatcttcttttgaaataaattagaaaccagcatcggcaaacatgaaccgattaaaaataataatgtaactaaccaattaacacataaagcataccctagcgcaaaaacaatcatataggcctgcatcattatttcaatttcagcatcaaaacgattagtttccagcagcttaaaatctgtagtcaaaaagcctaagctagcagtattttcttcgctagtctgacccagcatcccctttaaaatgccagctcgcagcgtcgtattagtctcttgaatagcacttgtttttaaccgattgaaaatcagcgaagcaataaaagtcgcaataaacgccccaataacaataactagaaattgtgctaaatcgccaaaccttctttgcgtaccaacattggtcaatgtctgtaccatatatgcaaaaatgatttgttgtgtactagcaatcaagcctaaaatagttaacataatgaattttgtatgtgaagaatatttgtaaatcattttttgtcctcctgtattttacttgaggctagtatcgcaggataatgacgaaaaatgttagaaatttacagatctgcaaatcgaggtaaaacattatgttcaaatatggttcaatttacaaacaattgcgcaaagatcaagaaatcactcaaactgaagcctgcaagggtatttgttcaatctctaagttatcacgctgggaaaataatcaggtagaagttgagtttagcaccgccattgcattactcaggcgcatcaacattacgcttgacgaattcacgcattacgctgcaatgaaaacagaatttacattgccagacgacattataacggccattaaagacaatgatacaaaggtactcgaaaaatttgttcaggagcagctaaatcattatcacgccaacaaaaatattctcgaactcaaaaacatcattcttgtctgcaatcaattatttctcatgactggtaaaaactatctaacacctgcagacattaatcgaatcggttcatacctgcttcacaacaccgtttggtctaaatacaatatcttgctttttgctaactcaccgtttttgctaaattctaaaatcggctatcaaattgctctgcgaattattcacaattttcaccctacagaaagtttaaacgaaaatactactattttcatgggcggtttatctgatacagttattgccttagttttcaaaaagaagctagattacgctcaaaaaattcttaatgaattaaaaaagataggacttcccttctatctcatgttctttagttcaacattgacccttttacaaaaaattatcgactactgccacactctcaacgcacagcctgtattggcaatgattgatgccatagttcagctaaattgcatggaagttgctaaaaaatggcttgagatttttaaagacgtacaacaaatctggccagaaaaagaaaattaaaaaccgtaaaagtaatttactttcacggcttttgacatggtattcattatgcaagcttacaaatttttagcttttaattaatccttaacaacgtctttggtgttcaaccattgactcttgttgatcttaacgatcttcttgccagcagctttcttaacatccttagcggtgtaagttgaacccattgaaaccttttggctagtcttgtgaccttgtgcgtccaaaacattaactttttggttcttagtgtcctttacagcaacaaagatcttgtcaccctttttaattgcaggatcagttggcatagtttcggcaacacctaactttggagcagtaaaactagctgcttgactaactgaagcaccaacacccattaaactcattgaagcaactgcgattgaaacaactttaactaaattctttgaaactaacataatgaatacctctaatttctatatcacttaatttgttggaactttttgttccctcattccttacgtctttattgtataacatatgttattaattacaaggggtttatcgaattttttaaaaataattcagtcgtctcaaagtattgctataataacgattgcggggattttttgtccaaaagcattaaaaaagtgtctgagaaaccgttctttcccaaacacttttttaagcagctgctacttcgtttgaattttgagtcacttttctagtttttaaactgacaaaaatcgctacaattagtgttattacctggattactaataatgtaaccaaagcaacagtaacattgaatgaaccagaaattgtggttaatactgttgtcataattggagcaacagccattaagattgtatttaataagccaacagttgaagccaagattttatgatcaactgatgttactagccattgctccattttaactgaagcaactcctgcaatagctgccaagaaaaacattgttatcataattacgtaagtatttcctaggaaaatgcttgttgtagtaacaatacttaaactggcagaaataattactaaactaaaaactgttaattttttgaataattgtggtccaaacattgaacccaatgcaaagcctgcgccaataaccacaccaaacaaagcaatagtaaagctataagtgccgattagcatagttgaacgatgagctgcaagtacaattgttgtcaatggagtaattgtatctaaagctccatttaataatgcgattactaataccacagtcaataatcctgattgtttcttcacttgggtcaatgaagttttcattgtttggaaaaagttttgatcattaacttcctttttttcaagtggcttctgatccttctgatgttttaagccaacactggcaaataacaaacctgctaaccagaaagtacctgcattaacaaaggctaaagttgagtatgacattactagcaaaagtgctgaaccaatgaattgagcacccatactaataatttgatttacgccgccattaaagcctactgcattcccgtattcttttttaccaacaatatcaacaattaatggtgcaaccaagccacctgaatatgaaccaatagtatctgataagaaattcacaacaacgatgattaaaaccaaattccactgtgacattttagtgataaacaataatcctactaaaccatataagataaatcggacaaatgctgctaaaaagatattgcgaaactttttcttagtcttatcagcaaggtaaccaccaaagatctcgaataattttggaactgattcagaaattgcaattaatgaaagtgctaatgagtagttttgtaatttgctagcataagtcatgaaagccaagtagaaaagaatatcgcctgcgcctgaaagaaaactagctactgaaaatcttctaaagtctgcgtttttaagaaatacgttcataaatcttacccctttttctttgtttcgtttgttgttgaaattataataaagtgaaaaagaaattaattttaaaaatggcgtattcgacattcggaggataaacctatgacaattggtgaattactcaaagaaaaaagactagcagaaaacaaaactcaaaaagcatgggttggtcatattatcagtacttcttattatgctaaagttgaaaagaatattcatagaattacagcagaggatttattagccattcttaaacataatgatctttcaattactgactttttcgaagaattagcagacaaaaaggatgaactaaaagcacaagtaaactcgctaaataaaacagtaattgatgctgtttatcattctgatgtttccaaagttaatgaagtcattcaaattattaaaaaaatggatctaccgactaagcaaaaacaagaacttatcttaatcaataaggggtttatcgaaactatcaaaaatgatctaagtgacaattatcagccagataaaaacatcgttcaacaactaaaagacaaaatttttagtattcctaattttaatagattcaaacttgaactctatactaatttcatgcaattttatgattatacaactaatattatgatcaccaaacaagtgatccataaaatagatcagtttaagagcgataaagagttattagcaatcgctggtattctattcaatctcctttcacaattagtcgaagaacatcattatcaagaaactgcaccatttatagcagctagtgagcatttaccctttttaccagacttatactttcctcaaaccggaatctcattgctaaaataccttattagttatcattttaataaaaaaacagcagacttagctaaagctgagatgattgcacaaacttatcaaattactggtctagaagactttggtaaaggtgcacaagaaattattaatgaagttaaagaggactagctttaagctaatcctcttgtttcaatctctaaataaaacctaacgcgttatagcacatgtgcaccaaaattgaatagcgcaaatctttggttgacatatagacccaagctaaaaccatgcctaagacccaatatactaagatatacttacttaatgccggatcatgcatatagccaaataaaaatccgcttgcaacaatacctagccacttatttctagtatttttcttagtgaaaaagatattgaaaaacatccctctaaagatatgttcctcacaaaatggcgcgatgaaaactactaggatcctaaataaacctgcattgtattccgctattttattcaagctttcctggttctttgaaacgccgccaccaactagattaagcatcacaatcgaacctactacaatcagtacaaaaccgatcatcgctattccgattctgcgccagtcccagtgtggtgtttcatcaaagccccaatcattttcttcttttaattgcctgcgataaatataggaaattgcaaacaaaactattaccgtagcaagcgccgtaacgaagacgcgatattgcgccaaatcaaatcgctgaggtctaaagtaaagtacttctaattcagaataaattaccaaagccaacacagcccctgcaatatttcccaggtaatgtccaaatctcttcatttttcattcacaccttgattctttcaactagtaatcattgtttctattataatgtaaataagaaaaaatacctaaggaggagtatctatctatgcttaatcagatcatcgattttttggggagacgcggtgagttcttctacatttcagtctttatgttactgatattttttgcctttttaatctcttggcttatcgaaccaagacgtttgattaatggcgttttgtttactatctttatagtctcaatgctctcttggatcaccgttatggtgcacaaaagtacgagtcacggcttgcaacgtgcctatgacctactagttctagctgcattatttggcattgtcttattattaattttcgcctggatttttctattctggaatgcctatttcgtttggaaatatgaaagccatactttgcctaacttgcttactttaattaccggatttttagcattaattattagtattatcgtgctcttaggaccaggtaagtacttgccacgttggcttagtctcgcattagcttcaattcccgcgattgcaatttatttgggattggtgctttacaactttttggtaaacttgcttctatatcaaatttatcctcgtacctaccaccaagactatttaatcgttctagggtctgggctaatcaatggcgaccaagtatcaaaactgcttgcggctagaattaatcgggcaattcaatactctaaccgccagtatcaaaagggccgcaagcgccctatcctgatcatgtcaggtggtcaaggcgctgacgaaaaaatctctgaagcactcgctatgtctcgttttgcacaacggcgtggcgttagtgttgaccgtatcttattagaagatcaatcgaaaaacacatacgaaaacatgctcttttctaagcgtattgccacaaaagattttggtaattcccacttcagggcacgcttctttagcaataattaccatatttttagagctgctctcttggctaaggaagttggtttaaaagccaatggtgtcggtgcttacaccagattctactacttgcctaacgcaattatccgcgaatttgccggtgtgtttgtcatgcataaacgccgtcatttcgttatcatgggattaatcgttttattctttatcctgcaagctatcttagtcatgacaggattagaaagatttactgtaatttagaaaagagggatgcaatgcttcaactaaagcatatttttaagtcatataaggtgggggacaacatcacccacgctttagacgacgttacaatctcgttccgtgaccaggaattcgtcgctatcttaggtcctagtggttctggaaaaactaccatgttaaacgtaattggcggacttgaccgttacgaccaaggtgacttgatcatcaacggcaaatctaccaagaattttaaagagaccgactgggatgcttaccgcaacaataccgttggttttgtttttcaaaattataatctaatcccccacttgtcgatcatcgccaatgtggaactagggatgaatttgtctggtgtgcctaaaaaacagcgccatgaaaaagcaattgcggcgttaacagaagtgggattgaaagaccatctaaataaacgtcctaaccagttgtctggcggtcagatgcaacgagtagcgattgctcgagcaattgccaacgaccctgatattctactttgtgatgaaccaactggtgcacttgatactgagacttctgtccaaattatgaagttgatcaaaaaactatctaaagatcgactcgttattatggtgacccacaatcctgaattagctaaagaatacgccacaagaatcgttaatttccaagacggtaagattcgtcatgattctgatccttttagccctaataaggaagaagacaaatttaacctcaagcgtaccaagatgtcttactggaacgccatcaagttgagtttcaccaatattatgacaaaaaaaggtcgaactctgctaactgcttttgcttcaagcatcgggattatctcaattgccgtagttttagctatctctaatggttttcaaaagcaaatcaataccacaatgagcaaagctttagcaaaatatccgatttctatttcacagaccgcaactgacattacttcagctaatgcacgtaaagaatcggataaaaatgtcaaaaaccgcggctatgtaacggcagaacaagaccaaagcgaacaggcccaacacgttaataaaattagcacaaagtatgttaactacatcaagaagatcaatcctaattatgccaataacgtgtcttaccaacgcggcgtaagcttgaatttattagctaaaaacaagggaaaaattgaacgcgtgcaattttcaaatacggatcctgatcagactaattctgttctagctgctagatcccaagcgatgagttcaatgggactgggttcaagtgtctttcccactactttaaataaagagaaagactcatttttgaagcaaaactatcaattgctctcaggcacttggcctactaaggcaaccgacttggttttagttactgacaataaaaatactgttaacatcaatgccttaaaaaatcttggtttcgatttaaagaataaggaacacgtcaaattcggccaattagtaaataagcaatttcgtgtagttgctaacaatgattactatcagcaattgccaactggcatgtttattcctaaaaaggtaaataacgccatgtataacggtgctcaaaccaagctaaagattgctggtgtcattcgtcctaaaaacgaagattcaatggccttgttatcaactggaattgcttatagcgatcaactttcacaacgcgtgattaatgaaaataaaaactctgcaattgtaaaggcacaaaagaagagtaaccatagcgtattaactaaccaaaaactaaatgccaatgaaaagaaagctacaatgcagactcttggcggtaccagcatccctactggtatcatgatttatcccaacaattttgatgataaagataaagtacttgattatcttgacaaatggaacaaggggaagaaaaaatcagacaagattctctatactgacatgtcaaacgctgttaccacaatgactggcggcctcttaagcgggataacgaccatccttgtcgcatttgctggtatttcattaatcacatctattattatgattggtattttaacttatacctcagtacttgagcgaactaaagaaatcggggtactcaaggcattaggtgcccgtaaaaaagacattactcgtgtctttgatgccgaaaccttcatcctaggtgttttctctggtgtattaggcattctgattgcttacctactaacattcccaattaacagtatcatttacaagattactgatctggcaaatgtagcccaactagatcctactgctgctattgttttgatcattatttcaactatcctcaccctcttaggtggtcatattccagcacgaatggctgcaaagaaagatgctgcaattgcattgcggagtgaatgaatttaataaagaatttgttacgttgttcacaataacctaaatttttagcaaaatatgtggtatcttagctttagcaaaaacaagtaagaaaggaacttttttcaccatgactgttaaaaaattagaaaataacagcgatgttaatgtagtggcagaagaaagcaaagttttaactgatttattgaatgaatcaactaagcaagtaatcggtcaagcagctttcgataagatccaaaacttaattaaaatctctgccgccaaagattatcaagaacttgaaaagcaaattgctagtcttaacaatcgcgaaatgattgttgttgcacgttattttgctactctcccactcttgatcaacatttcagaggatgtagaactagcaagtaaagttaatgtgcttaacaatactcatcaagattatctaggtaaattgagtgacacaattgacattgtagcccaaaagaaaaatgccgaagaaatccttgaacatgtaaatgtagtacccgttttaactgcccatcctactcaggtacaaagaaaaaccattttggaattaaccgatcaaattcatcaacttttgcgcaattatcgtgatgtgaagaatggcacaattgatcgcgatgaatggactgaacaaatgcgggcttgcattgaaattttgatgcaaactgacattattcgtggtcacaaattaaaggtagctaatgaaattaccaatgttttggcttactaccctaaggctttaatccctgcaatcaccaaatttactagtcgttacaaggaattagctaaaaaacacgggctaaacgctagtcatgctacgccaattaccatgggaatgtggatcggcggcgaccgtgacggtaacccttatgtaacggctgatacgctagaactaagcgctactttgcaaagccaagtaatctttgaatattacattaagcaaatcaataagctttatagagccatttccatgtctacttcttatatggagccatctgacgatgtaatgcacctatctgagctttctaatgatgattcaccattcagaactaacgagccatatagacgggcattctactatattcaaagccgtttagtgcacactgaacaaaaattactgaatattactaacaagaacactttcttaaagaaacgtgacctccaaaatcttgataaaatcccttgttatcaaaatgctcaagaatttaaagccgacttagaaatcatcaaaaattcacttgaagaagaccatgatcacgccgtagtagacagctactttactcaaattcttgaggctatcaacatcttcggcttccatctagctacaattgatatgcgtcaagattctagcgttaacgaggcctgtgtcgctgagctacttaagagtgctggaatttgtgacaattatagcgatttaagcgaagacaaaaagatcaagcttttactcaacgaattgaacaatgatccacgtaacttacacgccaataacaaacccaagtctgagttactacaaaaagaattaaagatctacaagactgctcgtcaattgaaagaccgtttgggtgaagacgtcatcaagcaacatattatttctcacactgagagtgtttcagacatgctagaacaagcaatcatgttaaaggaatacgatttacttgataatcaaaaagcccgaattcaagtggtaccactatttgaaacggttgaagacttgaataatgcccgggaaataattaaggaattcttaagctttgatatcgtcaagaagtggcttgtttctcaaaataattatcaagaagttatgttaggctactcagattccaataaggacggtggctacttagcttcatgctggaacctttataaagctcaaaaggatctaactaagattggtgaagaaatgggtatcaagattacctttatgcatggccgtggcggtaccgttggtcgtggtggtagtccatcatacgaagcaattacagcacagccattcaagtcaattaacgatcggatgcggatgaccgagcaaggtgaaattatccaaaacaagtatggtaataaagacaccgcctactacaacctagaaatgttagcttcagcaacaatcgatcgaatggcttctaagcaaattgttagcgaagatcatgtcgcagatttccgttcttcaatggatcaaatcgtagctaaaagcaacgaagtttaccggaaactagtatttgagaatcctaacttccttaagtacttcttccaagcaactccaatcaaagaaatctctggtcttaacgtaggttcacgtccagcttcaagaaagaaactcactgacttttctggcttaagagccatcccttgggttttctcttggtcacaaagccgtgtaatgttccctggttggtatggcgtaggttctggtttcaagtcatttatcgatgctgatccagccaacttgaaggaattacaaaatatgtaccaaggttggccattcttccactccctgctttccaatgttgatatggttttatctaaatcaaatatgagaattgccaagcagtatgcggatctttgcgaagatgaacaagttaaatcagtctttgatatcatcaatcaagaatgggaactaactaagaaagtcatcctacaaattgaaggtcatgatgaattaatcgaagatgcacctactcttaagaagagtctggaatacagaatgccttacttcaacattttgaactacatccaattagaaatgatcaagcgtgatcgtgaagatgtgattcaaggtgtttaccaaagtattattccaattactatcaacggtgtggcttccggtttacgtaattcaggataaaaaacacataaaattcagctaaaaaaggctcctcattgcctgttttatcaagcatttgaggagcttttttttaatttattaaactttttagttacgcctttttcataactaagttaagtggcgttacaattactggaacgacaatggctgtaaaaattgcttctactaaaccgttcatgcccagtgccataattaaaattaaaatcaatggcgtacctgaactataatttcctaggtaatgagttaagcttgctggatcatgcatgaagaaaatactcgtcagcaaaataaccatcacggtattagttaacgaagtgactgctccacttatgatataacccaatttcgcatatttagtcttactcatacccttcgcaataattcccgggaaatagccagccaaaatacttggtaccaatgaaattaccggattttggaacaacattaagctgaccatatcgccaggttgagtatatgcaacaatcaatctggtaataccccagaataagccaaagcctagacccgccttttgtcccattaacgtgccatagacggcaattgtcattggaatagtagttacagctggcaaagccgggataattcttacatagccaacatttggcacaaaagtctgtacaatcaataaagcagcaaagacagcagtaattgctaatcttttagtttcttctcttctcatatatttctccaacttaattctttagactcaattaaaccataattaagattttttctcagcaaaaaagtttattatacaatatctaggtatattttatctaatatgacaagatattgtattttttattattttttcctgaattgtcaaattaagtgcaacagttaggctatgaggaaatatattgcttgaagagttcttctgctgtgtgatattggaggattcggcgatatttgtggttaatggcatcagttgcctgttgaacataagcttttgacttgtctttcatgctcttgcccttagggaagaattgacgcaaaagaccattgcagttctcattggtgcccctttcccatggagaatatgggtgagcaaagtaaatctggcagcccttgatcttggtcatatccgcaaactcagagccattgtcaaacgtgattgatttaaaccaggcaggatgtctgtcaatctccttttgaagcagcctttggcatgtgcttgcccgatagtcaggaatcttgataactacttcaaagcgtgtggttctttcagtcaaagtcattaaagcaggctgattcttgcgtctgacgcctttaaccagatctccttcccagtgcagcggagcttttctgtcttcaatctctttaggacgctgttcaatggaattgccaagatgcttcttgtgcaaagcgtgaccgccatggctgtgatgacgcttgttcctgcgtcttttgagcttcataggcagatcaatattgcttatgtccagcaagccctgatcaatatagcgatagacagttggtgtgctgggacaagggtagcctggcatagtccttttgaattcaccaacgaactcatcgatgctggtggcatcaaatttagctttaaagcgtctggagagcattctcaaaaagacagcataatgcttcaatggattgcgctgatagcagtttttgcgacgcttctcataataaatctgtgcagtatcagcgtaatagtgctcatacaataaatagctgctgtctctttgcaggacacttccgcgtttgatttcgcgactgattgtcgacttatggcagccgacttcttgagcgataacagtacgggaagttatgccggaatccagcattgcttgaatttgtccacgttgtacgctggttaattgatgatagtgcttagaaatgctagaatttgaattggtcataaagatcttcctttcttgatttttcgtcacttcaagtttaggtcttcatggcctttttgtttaacacttagtgttgcacttcaattttaaatccgggtttattatttttttacttaattatgcattatccttactctctctaatgcataatcgtgttctataccaattaagaatccctttatatcaatactttatgttgtatgtcaattttgacatagccactaaatattgttaatctcgttttgtgttaaaaatcatttgatggagagaggatcaattttatgaataaaaaagtcaaaaaattactatctattggtgtgcttgcattgagtttaggtgcaattttaaccgcctgctctggtaaaaaacagggtgcaagcaataataaatcaagcgatgccaagcactctattgcattaattactggcggtaatggtgtaaatgataactcttttaaccaatctgcttgggaaggatttcaaagttatggcaaagagcacaacttgagccgcggtcgaaacggttatcaatattttcaatcaagtagtgctgctgatttcactcctaattttgatcaggcagctaaagctggttatcaaactatctttggcgttggttacagtttaaaagatgccgtagcttctgccgccaaacgctatcctaaaaagaattttgccattattgacgatgtaatcaagggacaaaagaatgttgtctcagctaatttcaagagcgaacaagcttcctacttggctggtgtcgtagctgctaaagaaaccaaaaccaacacggttggcttcatcggcggtgctcatggcgatattgtcgacctttttgatgccggatttactcaaggtgttaaagatcaagccaaaaaaatgcacaaaaaagttactatcttaaaccaatatattggcaactttactagttcagacaaggccaaatcaattgctcaatcaatgtacaccaaaaaagccgacatcatcttccatgctgctggtggtgctggtgatggtcttttccaagaagctaaagccattaatcaaactagaccagctaaagataaagtgtgggtaatcggagttgatgtcgatcaatctcatctcggtaactacactgctaaaggtgggcaaaaatctaattttgttttgacatcagtaataactggagtaaatgttgctgtcaaagatatcgccaatagagcttataataataaattccctggtggcaagaatttggtttatggacttaaaaacaatggtgtttctattgaacgaggacagatttcagcttcaacttggaaagatgcccaaattgctagagctaatatcctaaaaggcaaaattaaggttgccattcatcctaacaataaataaaagcatactagtatagtttgctttttataattacaatcaattattttttgcctgatcaatatttttgttgacaaaataccgaacaattaataaacttatttataaattgttcggtattaatattgtggaggacagaaataatgaacgtaaagttcaagaaaattttatcatttggtgtcgttttagcatcagttggcttgattctaactgcttgttcgggtaaaaagtctggtcaatcagccaacaaagatactaaacatggcattgccctaatcacagatgaaaatggtgttgatgatcattcatttaaccaagctgcatggtcaggatttaaagcatacggcaaggaacatggtttaaaacaaggaaaaggtggttatcaatacttccagtctagcagtgccgcagacttcactcctaactttgatcaagccgctacagccggctaccaaaccattttcggtgttggctatcaattagccgacgcagtcaagcaagcagccaagaagaatcctaaaaagaatttcgttatcattgatagcgttgactctgggattaagaacgtcgcttctgcaacctttgaaagcaatcaagcttcttatcttggcggattggccgcagcttacaccactaaaaccaacaaagtaggtttcattggcggtgctaagtcatctattattgatttattcgaagccggttttaagcaaggtgttgctgacggtgctaaagctcttcacaagaagatttcagttcaaacccaatacatcggtaacttcacttcaaccgataaggctaaatcaatcgctcaatcaatgtatgctaaccgcgctgatattatttaccaagcagccggtaacgcaggtaacggtgttttccaagaaggaaaagattacaaccaagcccgtccagcagctaaaaaggtttgggtaatcggagttgacgttgaccaatctaacctaggtaactacaagtcaaaagatggtaagaaagagaacttcactttaacttccgtcttaaagggcttagatgttgctactaagtcaattgctaatgatgcttacaatggtaaattccctggtggtaagcacttagtttacagcttaaagggtaatggggtttaaatcaccaaaggtaatttaaacgctaaaacttgggcagcagtacaaaaggctcgtcaacaaattattgatggcaagatcaaggttgctactgctccaactaagtaattcagctgcttagtattttgagaactcttcgttttttagcgaagagtttttctatagttaattaaggaagtatttatttacatgaaagaacagagaaataaagtaatcgagatgcgtcatattgtcaaagatttcgatggtttcaaggcaaatgacgatattaaccttacgctctatcaaggtgaaattttggctttgcttggtgaaaatggcgcgggtaaatctaccttaatgagaattttatccggcttgcttgaaccaacaagcggtgaaattctggttaataatcaaaaagtaaatattaaagatccaaccgtcgctaaaaagttaggcattgggatggtacaccagcacttcatgcttatggactcatttaccgttttagaaaatattattctaggacatgaatcaactaaaggaccagttatcgatctgaaaaaggcaagaaaacaggtcctagctcttgcacaaaaatatggctttgctattaatccagatgccaaaatctctagcattactgtcgcccaacagcaaagagttgaaattctaaaggtactttatcgtggtgcagatattttaatttttgatgaaccaactgctgttttaaccccacaagaaatttctgaatttattaaagtactcaaaaatttagctaaagaaggcaaatcaatcattttgatcactcataaattagaagaaatcaaggctgttgcagatcgagttacagttatcagacgtggtcacgatgttggtacttttgctgttgatcaagttagtgatgagcggttagccgaattaatggtggggcggcatgtcaacatgaagctaaccaaaccagcacctaacttgggcaagcaaattctagcaatcaaaaacttacaggtaaaaggaaatcacggtgccttaagcgttaaagacctttccctttcaatccgtggaggcgaaattttagggctagccggaattgacggcaatggacaagatgaactggttgaagcaatcactggtttacgccatgttaagtcggggcaaatcttaattgatagtcaaaatttaaccaaccaaaaagttcgcaaaatcaccgaagctggcgtagcgcatattcctgcagaccggcaaaaatatggtttaattcttcacatgtcattagctgacaacttagcgctgcaaacttactaccaacgtcccttctctaatcatggcatcattaatcatcaagcaattttgaagcatgccgtagatttaattaaaaaattcgatattcgaactactagccctgcattgccagctagcgacttatcgggaggtaaccagcaaaaagcaattatcgctagagaattaaatagaaacagcgatctaatcattgcattccagcccactcgcggtttagatgttggtgcaattgagtatattcataagcagcttttagctcaaagagcagcaggaaaagctatcctattaatttcatatgaacttgatgaaattatgcaattatctgaccggattgctgttttgcatgatggtcaaatttcaggcgaagtattacctgaaaaaactacagatcaagaactaggtcttttaatgaccggtgttaagaaagaagatgcaacaattgattaaagttacacctaaagtcaaaaatattctagtaccagttatctcagtaattgctggttttatagttggtgcaattatcatgctgatttggagttataatccttttcaagcatacagctccatgttctctagcgcactgggcaatatgaatggtattggtgaaactattcgtgaagctacgccattaatttttattgctatcggttttgcaattgcctcaaaagctggcttttttaacatcggtttgccaggtcaagcacaagctggttggttgacttctatttggattgtattggccaatcctcaattgcctaagccagtattattgcctttagctattattgcaggcgctatagctggtgctattgtggcaggaattgctggctatttaagagctcaatttggaactaatgaagtaattactactatcatgcttaactatattgtgctctatacttgtcaatatttaatgcaacaagtaatgtcctcaaaattaagaattgataccgatactaccaaaacaattccagccaatggcagcttaaagcttaactggttaactagcatgtttggtgattcgcgaatcaatgctggtattttcttagcaataattggacttattttttattggtatttaatgaaaaaaactaccgttggttttgaaatcaaggcagttggactcaatccttttgctagtcgctatgccgggatgtcttctaaaaagaatattattatttcaatgttactttcaggtgcattttctggcttaggcggtgtagtacaaggacttggtacctaccaaaactacttcactcaaacaactagtttggatattggctgggacgggctttcagttgccttacttggtggtggaactgcaattggtattttattagcttcacttcttttctcaattttaaaaattggtggtttgggcatgcaaactattgccggtattccttatgaaatcgtatctatcgtaattgctgccatcattttcttcatcgctatcaattatgtcattggtttgctttttaaaactaagaagaaccgcagtgattactacattccaaccagaaaagaaaaaggacccaacaatggtgttgatggtccaggtagaaaagtaatcgaaggagaaaaataatgaatttcgttacaatgatggcgttaattgtttcatccactttagtttattctgcgcctctaatcctagcttctcttggtggtgtttacagtgaaaactctgggattgttaatattggcctggagggtatcatgaccatgggagcctttgcggcgattgtcttcaacctaactttcgcttcaacttttggtgcagctactccttggcttggcactctagtcggcggaattgttggtttgattttttcattgcttcacgctgttgccacaatcaattttcacgctgatcatgtcatttccggaacagtgctgaacatcatggcaccacctttgggtgttttcttgatcaaggcaatttatgataaaggccaaactgaaaatatcaccgctaactttggctacttcagctttcctggtttaagcagcattcccatcgttgggccaatcttcttcaaaaacacctctgcccctgcttggattgccattattcttgctattttgatgtggtggattttatataagactcgctttggcctacgcttacgttcatgtggtgaaaatcctcaagcagctgacacaatgggaatcaatgtctatggcatgcgttatgcaggtgtattaatttccggctttatggcaggtcttggcggtgccgtctttgctcaagcaatatctggtaacttctctgtttctactatcgttggacaaggattcatggctttagctgccgttatatttggtaaatggaatccaatcggtgcaatgctctcatcccttttctttggttttgctcaaagcttaagtattattgggcatcaactgccaggaatcgatcaaattccatccgtttacatgcagattgcaccttacgttattacaatcatcgttttggtcctcttcctcggcaagtcagttgcacctgccgcagatggggttaactacatcaaatcgaaataaggaaaaaaggttgtttcacatgaaacagccttttattttacacatgtccacatagttatccacaagatatagtgcttatatgtggtagtcttactatatcttgtactaaataacagctatcggcgttttctcagttggcattggaaaatcactgttaagcaatctaagctcatcatctgtaagtttaatcttttgtgttgcaatattttccttcatgtgttctacactacttgccttaggaatcgttaaaacattgccattgcgcatcgtccaagctagcattatctgatgaggcgtaacgccatgatcacgtgcaacaattttcaaattacgcgtaattcgaattgtgttgcccttgcctgaattaaatggtgaatacccaataaagtttacaccgtgctcttcttgccaagcttgcagatcaaattctgtcccacgttcactgatattgtataagtcttcattagcaaagcattcttctccacctggcactgtaaaaagctcctgcatatcagccgtatcaaagttagatacaccccaataacggatcaagccatctttttgtaatgcttgtaagccgtggatcgtatcagacaagcgatgactgccccgccagtgtaatagataaagatccagatgatctgttccaagacgttttagactggcttctagactctgacgttctagttttggcgttgcatgataggggtagaattttgaaatcaaaaataatttttcgcgatcatatcctttaatcgcttcaccaattagctattcgctttggccatccccatacatttcggctgtatcaattacactcaggccatgatcaaggccatagcgaatagctgctatttcatcttttttctttttaggatcttcacccaaaccccagctaccaattcctaaacctgttagtttttcaaaattcatcctcgttcacttccttatgttcaaattttaacataattgattcgtaattatttttatcaatcaattgacaaaatggtctattccattttataatggactagaccaacaaatgaggaggacttaattatgaaagttattgttaccgaaaataaaattcaaggtggagcaaaagcatttgaaatttttgaaaaaggaatcaagaacggtgctaaagtcttaggtttggcaaccggctcaacccctgaaacactttaccaaaactgggtaaaaagcgatcttaactgtgaaaatcttaccagcattaacctcgatgaatacgttggtttaaccccagataatcctcaaagctaccactacttcatgcaaaagcatttatttgacaagaagccatttaagaagacttacgttcctgacggtatggcaaaagacgttgatgctttttgtaaagaatatgatcaaattatcaaagacaatcctatcgacattcaactattaggaatcggccgcaatggtcacattgcctttaacgaaccaggcactccattcaacatcggcactcatgaagttaagttaaccgaaaatactatcaaggctaatgctcgcttctttgacagtatcgatgaagtgccaaagagtgccatctgcatgggtactgctaatattatgcaatctaagaagattgttttgatggcttttggtgaaaagaaagctcacgcaatcaagaaaatgattgaaggcaaagtcactgaagaagtacctgcatcaattttgcaaaaacacccagatgtaacggtgatcgtagacgaggctgccgcacaagaattagacgacaaatacaagaactaaaaacaataatttaattatcagcatagaaaaagctaggctttctacaatcgtggaagacctagtttttttatttagcagcctgtatctacaatgaaatatacttcacaaaattgcatttttatataaaaaatgaagcataattcagttttttattgaattatgtttcattcctattcgattttttatttctacccttgacttttagatgtgaaacataatcaaaaaatcacttgtgtgccacaacatatcgtattaaacttaataattgtctacatatggtatttaagaaagaatgtgattcaagttattgttttaagtgggccaattggagccggtaaatccagtttaaccagtattctagctgaacatttagggactcaggcattctatgagggcgttgataacaatcccgtattgcctttatactacaaggacatgaagcgttacacttttttgcttaacacttacctccttaaccaccgtttagcacagatcaatcaagcaattcaagaaaaaaacagtgtctccgatcgttctatctatgaagatgcactgttcttcaagatgaacgccgatagcaaggtcgctgatccaaccgagttcaagatctacgatgacttactcgacaacatgatggaagacactcctggcaatccaagtaagaagcctgacttactgatttacattcatgtctcccttgatactatgcttaaccgaatcaagaagcgcggtcgttcatttgagcaaatcagcactgatccaggtttgaaagattattacgcaagacttttaaagtactacgaaccatggtatgaaaattatcatgcctcaccaaagatagaaatcaatggcgacaaacttgattttgttaccaacatggatgcacaaaaagaagtacttaaagaaattgatgaaaagttgcatgaaatcggcaacttataagaaaaagaaggaacgtgatgacagttattgttttaagcgggccaattggagccggtaaatccagtttaacaggtattttatctaaatatttagggactaagcctttctatgaaagtgttgatgacaatccagttttgccacttttttacgctgaccctaaaaaatatgcattcttattgcaagtatatttcttgaacacacgcttccacagcattaaagacgcgctcactgaagataataacgtcttagatcgttctatctatgaagacgccttattcttccaaatgaacgctgatatcggccgtgctacttctgaagaagtcgatacttactatgagttattgcacaatatgatgggcgagttagaacggatgccaaagaagaatcctgatttgcttgttcatattaatgtttcatatgatacgatgatcaaacgaattcaaaaacgtggtcgtccctatgaacagttaagttatgattcaactttagaggactattacaagcgtctgcttcgttattacaagccttggtatgagaactacgattactcacctaaaatggaaattgacggtgataaattagacttcatggctaatccagatgataaagaaaaagttttggatcaaattacagccaaactaaaagagatgggcaaattacctgaagattgggaaaagcctaccgatattcaaattgaagcataataaaaaccattcatttgcgaaattatcgtatttgaatgattttttgtttacagtgaatttttcgctttattgttgtataatttgaaaaaatgtgtttaaaggaggagtttgaaaatgatgttaaccgtaactggtggacaatggtttttcccacttgtcataatttgtctaattttgggtattgtcgcaaccatcgctcaaaagaaaaagctgactaaactaaaaagaataaccgataactttgcctatgcaatattagttattctcttaatcattgaatggattctatattttcaaaaacaatttaattttattactccagcaatctacacccttgttgtcatctatcttattggacggcaattactaatcagataccgttcttctctattgaaaaaattaggggctaaatataagcaactgacaattggacttgctactatttacattattttagttaccttattgcttttaatcggatctaaattttcaactatgggctggatcattgctggattagttatcgtagcctttggcttcgttagctacatctttgaaaaagacaaacaataatttcccaggaaataataactcgcatagagcttctatgcgatttttatttattcaatttttgctaatgccttcgcaaccccatcatgattgttatcagcagtaatttgttccggagcaaatttttgttttagttctgctggggcattacccattaaaaatggataccccacttcttccaacatatcttcatcgttatagttatcgccaaaagcaatgcaattttgcaagtctacgccatattcttgagcaactattttgactgcactagccttgcttacaccctttaaaacaatttctaataaattctctgctgatctaacaaaagtcaaatcaggatatttagcagttaattcttcttgcatacgatcaagatccgctgaatctcccataattagacctttatgcacgccctgcagtttttcaagttgattaattgtagtcggtgttgcttttacatcgacaattctttcttcatttttaacccgtgggctcttttcttcactacaataccaaacatagccactatagatattccaagctgcatcattatcttgctcatcaacgtagcggcaaatttcagctgcttcttttgcattaaaaaaacggctgattagtactttgcctgtttcatcaagggctaaagcaccgttatacgcgataaacggacaaactttcaaaatttgattaaccactgtcatcatccctttaggaagacgtgctgatgcaggaacgaaaatattaccattaataatttgtctacgaattgcatcccgcgttgcggcggttacctttaaatcatcattaattaatgtgccatcaagatctgaaaaaataagttgtgcggacattctttcacctttatttcttttttaattcttatatcctaggataatgctttatttatgctaatgaaagctgattcaattaaatgcttttcctatcatttaaagataaattgcaataaatgcccaagtaatcattaaaataattcgcgtttacaaatttatttatcaatgctaaagtataagagttgtgttcaataagttaaaacacgaacaatattttggggagataaaatgaattttataaaaagctactttcaattagataagtacaaaaccaacattcgaactgaatttattgctggtttaactacctttatcagcatgtcctatattttgtttgttaaccctagcgtactgggcgccagcggtatgaataccggtgcagtcttcaccgctactgctttagctgccgctcttggtactgcaatcatggggatcgttgccaactacccgatcggtgaggcaccagctttgggaatcaatgccttctttgcttacaccgtatgtattgggatgcatgtttcatgggaaacagccttggcttcagttttcgttgcatcaattattttcatcttaattactttattcaaattaagagaaaagatcattgattcaattccagctgacttgaagttcgctatttcatcaggtatcggtttattcattgccttcttaggtttgcaaaacggcaagttaatcgttgcaaataaatcaactttggttggtttaggttcacttcacgatccacttgtttggattaccatttttggtttgcttgtaactgttatcttgatgatcttaaacgttcctggtgcaatctttatcggtatggttttggcagctatcttcggtatttgtaccggtcaaattgcattgccacacaaggttatctcaactgctccaagtttggctccaacttttggtcaagctatcttccacgttaaagacattaacactgttcaaatgtgggttgttgttttaaccttcctgcttgttactttcttcgatactgcaggtaccttaatcggacttgctcaacaagctggtttcatgaagaacaacaagatgccacgtgtaggtaaggccttagcagctgactcaagtgcgatggctgttggttcaatccttggtacttcacctgttggtgccttcgttgaatcaagtgctggtatcgccgttggtggccgtaccggtttaaccgcagtttttgtagcgatctttttcttaatctcaatgattttcagtccattgcttggtgttttcactagccaagttactgctcctgccttaatcattgttggagtattaatggcacaaaatactgctcatattcattggaacaagttggaaattgcagttcctgcattcttgattattttagggatgcctcttacttactcaatttcagacggtttatcatggggcatgatcacctaccctatctgtatgcttgctgctaagcgtggcaaggaagtcacaccgatgatgtgggtactgtttgtagtattcctgatcttcctgtgggtactgaacttttagatgaaaaagaatagataaagaaaaggactaagttcgaatttgaacttggtcctttttgtgtattcactaacattactttttattcttatcgattataatcgataaaaacgtcaaaatcaccaatcttatcgagtataatcgataagattgcaaaaaaagagtcttttatcgactatactcgataaaggctcttttttatattacccaggaaatattaacgtacagtttctaaacaatatgattttttataataaaatgcgtcataacaggcgaattttaattggctttaaaatttcttttttctaaaaacaagatagcctaaaagggtaaaaagaactatatagcacaatgtaccaattaataattgtggattagagagatgggaggttaagtgataagttgcataattataatactgtgtcgttaaattgagcatattcaaaggattccaacgaataatatcaaccggtccaatattataatttaataaattagatgatagactgcttcccataaagataataattgcatttatcataataactacggtgtttgaattaatcatacaagacattaagcaaataaggctgattattaacgtagaggttataatatcaacgcctgttgttgaaagcatatttataaataatgactgattatacttataagtcgcagtccaaggaactatttttgctataagtggaacagtgttaaagaagatagttacaatcatagctatggcatgtagaaaaagattataaataaaaattgtaatgaactttgcaagatatactgttcctttattttgagcatgatatagtaatgtcaaaatcgttttgttttggaactccattgagaaaatagttgaacctactatgaccaaaatcaacataattatttggctagagttataacaagtcataactaacaaattgccatattgttttcccatggccaatcccataaaaatcataaaaagaatcataaaactgataatccaccaaggcagcttacggtgacctaacttatagaattcttgttttaattccgcacgcataaaagatcacctccgcctaaatagaccgctttttaaacagtaaagcgccaatccaaaagaaaactacagcgtacactaaattagcaataattaattctgaattagtcaaatgtgttacagtaaccatctcattattcgatagttgcgtaatgatattaatcatatttaatggattccaggctaaaattgatttcaaaccaggaaaagccgacattgctaaatttgaaagatctgaaccaagaaatccgattgctagtccgattatgatcactgttgcattattcctaatcaacaaaataagcattaaagagagggcaacgataaatattaaataaatcatcgttcctcccatatttaggaatagcgcattgattaagggatgtccatgataatcatcatgccaagaaaatttcgaaccaaccatcaaggtcttgagaataaacgaaaagattatcccaaataccagtaagatgaaactataaaaaactaaaacaatgaacttagctgtataaagaatggacttatgtgatgttttgtagagtaaggttgccatagtattatttcgccactccattgcgatcatatcagaactaatagcaataatgatgataatagcccattgtcctgcaccgaatccttgagataagagtgagggcgtcattttataacttgtaccaactgtatacaacattagtactaataaaacgagaatcccatacaatggaatcttgcgatgagcaaatttatagaattcgtgtgagagattaattttcattattatctcccccttgttcttgccgtaagatgttgacaatcttctgttctaaagttaagccagttggagccaaatattctatccagatttcattatcaaacagtagcttttgaattttatctatatctttatgatcaactattacagcatcatcttgtctatcaaaaggaattttagcttgttgtagcaaattggtagtttgctttatatcagttgtttttaatttagattttggatttttttcttgagtgaatttgctcataggtgaatttataataattctaccgtgattaataatgattaccgatgtcattactttttgtaattcacttaagacgtgactggaaattaagaaggctgtaccacgtgcagcgtattcatgtatcagttttcgaattaagattgtagcttcaatatccaaaccattcataggttcgtcgagaataaccagttgcggattatttaacaaagccaaagctattcctagtttttgcttcattccaactgagtagtcttttgcctttcgatcaatataatctttcatccctaatcgattaatcagtttatccataccacttaagtctttagcatagagctttaaattatcatatccagacagaaaaggataaataacaggcttttcaattaaagcaccaacagattgtagtgctaaatgatctttaagagtaatttcgtgatcattaaaactaattgaaccagtgaatttagttaatcctagcaaagttttcataatggtggttttgcctgctccgttatgaccaataagtcctacaatttcaccaggtgaaattgtaaaagatgcatctctaataatctctttgtgaccataaaaaatatttatattgttaacttttagcatgctatcctatctcctttaactccggattagacagagtgttaaatcacttttctaattaaagtacctatattaaagtacgcgtggtgctagttaaatcgttttagttaataaaaaagtccaattagactagactcaagttgtaagtaatttaaatagaaaagagtctgatctaattgaactatctcaagcttaatcgtttttctcaccatttacaagttagttttaatcggttaaatgtgatttgtcgctcgctgtataagctttatgcgcctgatggacttaaacatcgtaaaaatgttgatcagaccaagcttcctgatagttctatcttagcgatgctcatttggcaaactgaaattggaattgaatctcaacgaagattctgtaaattcttcgttggcttatctcattctcgttttaaccgtcgagctcgaatgctcttgcctctaattcgttgtatccgtcagggttggaatcaggaagtaaaggtaggtggagaattattgattatcgacagttttccgattccagtttgtcagcctgttcgcaattatcacgttaagatcttccgtggcatagccgatattggttataaagcgacgaaaaaaatctactattatggcttcaaagtccacgcaatagtgagtgatgatggctatctgcttgactacgcagttactaaggcgtcggtacatgatgcaaaagagacggtagaattgatgatcaatgctcatccaattaaccattatcttttaggagatgaaggctatttaggaaaagacttagcagccaagctaaagcgtatgggatacgtgctttggacaccatatcgtaaaaacatgaggggtgctaaaaagcataatgatcatcagttaatggcaattagaagaacaatcgaaagcgacttttctttgcttagctattacaatgctgagaataatcgagccaggagcttagtaggttttcaacaacggctagaaatagctattttagcttataatatggcatattgtctagaacgatttaactagcaccacgcgtattaaagtctagtatcctttcctgaattgtcaaattaagtgcaacagtgtaagtgtcaatgtttttgcggtagcctttaaaccattagtctaaccttaatttcttaaatatttatatgacttaaatttctgcttagcttgcttaaataactattgccagctacctgtgcggttaatgcgccatgctggatgcctaaatgaacttcatgacgcttctttaagctgtcacgggccgctgcttttaattcctgttcagtcaatacagttatttctgaatcttcaaactcgctgctaagccaaaattccagctctcgattcttgatgcagcttaagatcctaagcatgccttctgctccagattttgaccatttcttgccttgccccttaacacggtaggtatacttgcggtggttgctctcgcagcagccaatggctttagtcacagtcagttttcgtttcttaaacggcttaatatcgtcccaatgacgatcaatataattccttaggcgccccagataatcatgattgagctcggtattcaattcatcaattagtcggctttctgcagtggttaggatagttttaactttgtcatagctgtatttgtattccaaagcagaaatcagcttgccttgcaggtcaggcgcaaaatatagcctttctttgattttcttatttaggtgaaagacatccaagaaatgctcatgacgcttgcatagccctacaatgtcatcgaagtctgttttggcatatccagcaccgccatcggcgttgctaagaattacagtatcagaaagatcataagtattggccaggtactccttggcttcgttcagcgcatcaagtcggcttaaagaaacaaattccttggcattgattcgctttctgcgtttcttgcttatattgacaatgccttcacagacctgatagcgatgaaattccaaccggcttttagtgcctttgatcaccacgccatcgccttcaagatacaaaactgggacctttttcttagtgcctgcggcatcatatcttgaatctgcttcttggcccgctttaatatttttctcggccatttttaccaaattgcccacctgcatatggctaatattaaagccagacaggcaattgactgctagagcagtattgcgataagtggcaacgctgcttacttctaagatgtttttgactgctaaaatactgtagcgcttgtatttgtcaaagcccattaattcatccaagggataccttgcttgtttgcctgggcagacatatcttcttctgacatacctaacttcgccaaaagccatattgattgagcgctcattcttcttatcaatctgatagccctgtgctttaaccttggtaatcatttcatcatcaactttagctaaagccaaggccatgatttccttaatcaggtttaagaagaaacagattatttttctttcacgcttaatataattatcttcagactttataatatttgcgatttcagttacaattgaattcataaaagaccagcttctaatgtgttttttgttcttaacatcagactactggtctttttgtttgagctcaagtccaaattcaaaggacttgggcttttttaattatttattcaacttaccgtaaaaaattatacacttaggcaacagttaggctatgaagaaatatattgcttgaagagttcttctgctgtctgatattggaggattcgacgatgtttgcggttaatggcatcagttgcctgttgaacataagcagctgacttatctttcatgcttttgcccttagggaagaattgacgcagaagtccattgcagttctcatttgtgcctctttcccaaggagaatatggatgagcaaagtagatctgacatcctttgattttggtcatatccgcaaactcagaaccattgtcaaacgtaattgatttaaaccaattaggatgtctgtcaatctccttttgaagcagtctttgacaagtactggcccgatagtcaggaattttgataacaacctcaaaacgagtggttctttcagtcagtgtcattaaggcaggttgatttttacgtctgacgcctttaaccaaatcgccttcccagtgcaggggaacttttctgttttcaacttctttaggccgctgttcaatcgaattgccaagattctttttatgcggagcatggccaccatgactatgatggcgtttgtttctgcgtcttttaagcttcattggcaggtcgatattgcttatatccagcaatccttgatcaatataacgatagacagtgggcgtgctaggacatggataatttggcataatcctgtgaaattcaccaacgaattcatcaatgctggtggcatcaaatttggctttaaagcgtctgcttagcattctgaaaaagacggcatagtgttgcagtggattacacttatagcagtttctgcggcgcttttcatgataaatttgtgcagtatcagcgtaatagtgctcatacaagacatagctgctgtctctttgcaggacactgcctcgtctaatttcacggctgatagttgatttatgacagcctacttcttgagcgatagcagtgcaggaggttatgccagaatcaagcagagcttgaatttgtccacgttgttcgctgttcaattgatgataatgcttggaaatgctagaatttgagttggtcatgaagatcttcctttcttgatttttggtcacttcaagtttaggtcttcatggcctttttgtttaacacttagtgttgcacttcaattttaaatccgggtctagtatccttttaataaatacgcgtggtgctagttaaatcgttctagacaatatgccatattataagctaaaatagctatttctagccgttgttgaaaacctactaagctcctggctcgattattctcagcattgtaatagctaagcaaagaaaagtcgctttcgattgttcttctaattgccattaactgatgatcattatgctttttagcacccctcatgtttttacgatatggtgtccaaagcacgtatcccatacgctttagcttggctgctaagtcttttcctaaatagccttcatctcctaaaagataatggttaattggatgagcattgatcatcaattctaccgtctcttttgcatcatgtaccgacgccttagtaactgcgtagtcaagcagatagccatcatcactcactattgcgtggactttgaagccataatagtagatttttttcgtcgctttataaccaatatcggctatgccacggaagatcttaacgtgataattgcgaacaggctgacaaactggaatcggaaaactgtcgataatcaataattctccacctacctttacttcctgattccaaccctgacggatacaacgaattagaggcaagagcattcgagctcgacggttaaaacgagaatgagataagccaacgaagaatttacagaatcttcgttgagattcaattccaatttcagtttgccaaatgagcatcgctaagatagaactatcaggaagcttggtctgatcaacatttttacgatgtttaagtccatcaggcgcataaagcttatacagcgagcgacaaatcacatttaaccgattaaaactaacttgtaaatggtgagaaaaacgattaagcttgagatagttcaattagatcagactcttttctatttaaattacttacaacttgagtctagtctaattggacttttttattaactaaaacgatttaactagcaccacgcgttaataaatattttttactatgttcacatatgaacaataaatttaagattatctctaataaaaccgattttaggatttttttgaataaatttgctttatttgtttaaatgcagtttcaaaaccatcttttagagtattcaagccctgcagttctaaagcggcccacatcaaccgtaaattgcgatcatcatttgtttccaaaaaatttaacataaaatgcatgtatttgtatcttattttttcaaaagcaaacctgtctgtaatatctaagccagaaattattgcatctaatctttttgccttctttagatcttttttaataagaatatattctgcattaatcaaagtatttaaaatagctgtagaaaatttcgaaactgtcaaatcttttgtgtaaatagatctttctcgtaaattgattttttaattatttatttaatcaaagtaggattctaaggtgtcctgaacctgaccaaagcctttatgaattcgattgaaataacggtcattgtagctcattgcctgaatgccaataaaagcatcaagcgactgttcagttggaaactctgccttaggcttagctttgcgcttgatcacattgttaaatgattcaatcatgttagtcgaataaattgaagctctgatctgcttgggatagttataaaagaccagcagatctggttctatgtctttcaagcttctgataacatggctgtaaaccttgccccatttggtatagaagtcatgcaggacagctgtggcttcttctttgtttgtctgttgatgcacctgtttgaattcgttcatgatcttttcacgatcatcgacgcgtactttagcgcagatattgcgcatgacatgaaccaaacagcgttgaaaatgagctttaggataagtcctggccaaggctgttttcatgccaacaacaccatcagaaagaaaaagctcaacttgctttaagcctcgggatttcatgttttgaagcatatctgtccagacttcaatgttctcgctaggcgcaatgcagtagtcaatgacctccttgtgcccattaggcttgatgccaatggcaatatagactgcttcacgctcaaatgtttctcggcgcaaaggaaggtatgtcgcatccaaatagacgcagaaaaacttgtcgcttagcttgcgtttgtggtaagcctcaacctttggaatcatctgcttggaaatatttgatacctgagctggactgtaatggctgccatacatcttttcaattagatcggctatttccctggtggtcacgcccttggagtaaagcttgataatcatgctttccaagatatccgagtgctgcttgtagccaggcagcgtgtgctgatgaaattgaccgttgcgatcccggggcacttgcacttcaattgggccaaattgcgtatcaactttgcggaaataagcaccatttctagagttgccagtattccagccatttctggcatagggatcatagcccagaaaggcagtcaattcagcttctaacaagttattaacagcctgttgtagctctttgcgcaataaatcatttattttgtctggattgaatagagcttgagcaaaatctttggtaaaatcattcatgaaggagttcttctttctgtatgtgtttttttgttcaaaccaatcatacgagaaagaaactcctttttctaatgtttaaagaaataaatttaaggaatcattcatccttacacaaactattttacagtctcaaaatttcatttccaaatcgttattatttttaaaatagaaaactagtgaaaaagataaactataaatagttcttgggctaataagattctgagtattaccaaagaagtacacatcatcgtaataccaaacttcatctccagataaaatttttgaaaagtacatcgataatctctttttatagttatctgtaaaaatatccactcctgtaagatcgtaataagcattacaataaatggctgcttttaaaaaagttcgtttatcgaaactgtcattttcaacttctgataacaattttttagattgcgtttttaagtaattaatatcattactttcatatgcttttgaaacttctaaagttatattttttagataattcgaaatattattattaaagaaatctattttttggacatgaattacttcgagtagtttgaatactttttcaatatctaaacctgcttcgcctctttcccatctttctaattttgaacgagaaatacctactgcttccgcagctttactacttgaaattttggttgcctttcttaattttctaaattttctaccatatgtttctttcataacccactcctagttacgttcacaaataccttcaaaataatgatccagataaaggactagttttacctccttaatgatgccttaatgcaataaaaaatcaaactcataaatattacctaaattttcatttagagctactaaaaaagcctaataccatcatcaagggtattaggtctttattacctaggaaatactaacgtacagtttccaaacaatatgattttttatgacagtttgggcaacgcaattttctagtatgtggcgtgtgtgccgcaaacataaagcttttaagttctggaacaaatttgtaatcgcaattaggacaaatatatgccactttttgataataatttttaagtaacacgaatgacattgcaatcaagcttactactaaaatagctaccgaaatataggctgcagtgttcatcttattgatgatacagtacgcaataaatgccataccgaccaattcaacagtgatttctactgctgacaatttccacattgaacgtgttacctctttgtatctagtttcattattcatgattttcgtaatgtcagtaacttccgcaatattattgggtttacttagaaccttttgtagttggataattttcttgttttgctcttctaatttttgcgtttctgctttatttctttttagttgatcttcaagcaaaagatcgattaattttaattgttttacctgctcatcagaatataaacgatagccactttcactaactcgactgggtttgaccaaacctttttgatcatagtaacgaatggttctagtggttatgtttaacttctttgctagatctccgattgtgtattctgacattactttctcacctcacaacttaaatatacgggtttacgctacgtcagagtcaagaataagctaaattttccgtaaaaaacttcaaaaagcaaatattttgctcttttcctattgaaattattaacattaactgtataattttaagtgaatgttcactttatacaaatttcggaggactaaatgaacgcaatcagtaatttctttcatttaaaggagaacaatacctcctttaagaccgagcttttagccggtttgactacttttgtaagtatgtcatacattctgttcgttaacccaaacgtcctaggtgccagcggtatggataaaggtgctctattcaccgttactgcattgtcggctgcctttacctgtatcgtaatggggcttatcgctaactacccaattgcttccgcaccaactttgggcttaaacgccttctttacctatactgtttgtttaggcatgaaggttaagtggcaaactgctttagcagctgttttcgttgcatcaattctgttcattttgttaactgtctttaaggtacgtgaaatgatcattgatgccatccctgccgatattaaatatgctatttccgcaggtatcggcttattcatcgcctttatcggtttgcaaggtggtaagttgattcaaaacagtgattctaccttagttactattggtagtctcaacaaccctactgtttggatcactatctttggtttaatcattactattttcttaatgattgccagagttccaggtgccatcttcatcggaatgatcgccgctgctgtttttggcatagtgactggtcaaattcccatgccgaaaggcgttatctcttcagttccaagcattgctccaacttttggtcaagcagtcttccatattggcgatattaataccgttcaaatgtggatcgttgtctttacattcttacttgttactttctttgataccactggtaccttaattggtttggttcaacaagcaggtctgatgaaggacaacaagatgccacgtgctggtgaagctctagcagctgattccagtggtatgttggtcggttctgttcttggtacctcacctgtcggtgcctttgttgaatcaagtgccgggatcgctgttggtgggcgtaccggtttaactgccgtttgggttggtattttcttccttatttcaactatcttcagtccaattttgagtgttttcactacccaagttacggcaccagctttaattattgttggagtattaatggccgaaaacttggcacacgttcactggactaatcttgaaattgccatcccatgtttcttaatcgcattgggaatgcctcttacatactctatttcagacggacttggctggggtttgattgtctaccctgtatcaatgatcgcagccaagcgtttcaaagaaatcacgccaatgatgtggattttgtttattgttttcgtaatctacttcgttgttttaaatgtaaaataattctatcttataacccccttatcttacttttacattaatatataccctcatctaaccaagtagcatgtctacttggtttttatgctaaaaagatgtctgttaatagtatggatgatgacagcagattctattagatgatataataatcaaagaaaggctgtgactaaaatgaaatcatataaaaaaattcaagctaatgttgactcctcactagcacttcaagcagaaggaatttttcaagatatagggctcaataccactaccgcaataaatgtgttcttaaagaaagttgtggcaactggtggtatcccatttgaattaaaagaaactcctgaacaaaaagcctcaagagaattaattcaaagcatctcaaaaattccccacaaagaagctaaaaccaaaaaggaaattgaggattggctagatgaggactaatgatattgtagatatttatgttgcttacattgataagcctggaggaaaaaataggcctgtattaataattaaattactaaacagtaaagcttggctgctaaaaatcacttcaaaatataaagaaaaaagtgaaaatatccgaaagcattactttcccatttttgactggaaaaaatataatttagataaaccatcatacattgatactaaaaattatttaatagttactattagtgatttaaatatcgaaaaataccgaggccatttctcaatagcagatttacgcaaattaaaagattttattgacgaaaattcaaactaagaattaaactatatgttttagttcctaaacacaatctcaaatatgagattgtgtttttatttatccaaatggcatcttttgataatcatttgacgccttatgatgttcggattcttctaaattgccgctatactattttcaacaaatcgagttatgaaagatttatttaggaggaattcattatgacaactcaagaaggaaaaactgctttaattactggttcatacggtgggcttggtacccaattcgttaacattcatgcttcacacgggggtgacctaatcctagttggtcgcaatgctaagaaattagccgatcaacaaaaagaagcccgtagaaagtacaacgtaacggcgcatattatcgatgttgatctctcacaaccagatgctgcgcaaaagatctatgatacttgcaaaaagaacggttggactattgactacttaatcaacaatgctggctttggtggtcaaggcgaattcattaaaagaagtatggaacaagacatgtccatgatcgccgttaacattgaaacgcctactcgtttaactaaattatttttacctgacttcgtaaaacgcggccgttatgcctggcccacttcaagccgtttactacgctactaaagcatacgttacaagctggtcaaatgcgttatggcgtgaagtacaaggcacaggcgttacggtaagctgcttaatgcctagcgctatgcaaaccggttttatcagtcgtggtgatttgagttcaactcaattattcgcccatgcggttagtccataaggtgttgcaaaagctgggtatgaagaaatgattgaaggcaagcttaacattaccgctggtttaactgcagcccaaaaaccattcatgaaattggaaccaatgttacctaagaagatgctcatgaacaatgtttataagatgcaagaacaaggtagtagaaagtaatcaacttatcttataatatggatcaaaaggatggtatttgaatgaatcactttattttagatggtcgctatgaagacctactctcttttaacgttgaagaagcacttaaaaaagccaatattcctgaagattgtttcaaaaaactccatccttcaatgagtgaacaacaatactacaattttatggcggctattggtgatcagattagtgatccattcactccaattgaaattgcaactacaaatccaattgaatctttctctccaccaatttttgcggcatatagtagccgtaacggagatatttttatcaagcgtctagccaaatataaaaagctgattggcccattatcttttaaaattgatgaggatagcaagcagctctctattaccctaactccaagtaatcagcaatattccctaccctcttttctagttttatcagaatttgcatttttagtgggacttttgcgcaagacgaccaaagaagctatttccccgctgaagatcacaatgacatcccccgtcaatgatgagcaggtcattaacttctttggctgcaaaatcgaatcgggtaaacgcaacaccatcacttttgccaaaaaagacttgcaggtcaattttattagttataactaagcaatgtgggattatttcaagcctgaattaactaaacgcttatctgaattatccgttgatgattcaactagtgctagagtacgtagcatattgaccgaattacttcctaatggtgaatttacaattgacgatgtagctaaaaagttaggttattctaaacagactttacagagaaagttgagtagcgaaaaccctacttttcaaaaacaactgaactccacccgagaagttttagcgctaaattatttacaaaacaccgatatgacaactagcgatattgcttaccttctaggctatcaggaatttaattcgttcttacgtgccttcagcatctggaaaggcataagcattagcgaatatcgtgaaaaaatgaataaataataaaaagcagatatattttctgtttttttactttataaaggaaataatatgagatttttgctataatttactttataaaggaaataatatgaaaattgctaaaaatttactttatgaaggaaataatatgcagttaaatttaattaaccgcccacagtatttaaatcaattacttcaatttcaaaatacagaattcatcaaagtactgacgggagtacgaagatcaggcaaatcttatattttaatgctttatcgtgaatatttactcaaacacaacataaatgaacatcaaatcatttatatttcttttgaagactttgataatatagatctttatgaacctaaaaagctttattcatacttaaaagaacgaattattagtgaccaaagaatgtacattctacttgatgaaatccaatatgtatcagattggcaaaaagtagtaaatagccttcgacttaatcctctacttgatatcacaattactggcagtaattccaatctattaagtggagaattagcaaccttactatcaggaagatatgtagaaatacatgtttatcctctttcttttaaagaaatgctagattttaaacatatttctgaaccatcagagcgtcagattgataacttatatgatgaatacattaaatatggtggtttccccgcggtagtgttagcaaaagaagaattaaaacaaactattctttctggaatttacaataccattattgtcaatgatatcggctacaaaaatggattaagagaaccagaattagttgcattagtagctaaatatctagcagattcgattggtcaattaattaatccgaacaagattgtaaatacactaaaatcagcaaattttgatatctcttataacgctgtgcagcgttaccttaaatattttgaagaagcatatcttttttataaatctagtcgttatgatattagagggagaaagattctttctactcaaggtaagtattacattgtagatactggtttgcgtacccaagctttaggagaaagaaataatgaccgcggtagtgttttagaaaatatagtttatgtcgaattacttcgccggggctacacagttcaaattggtaaattagataataaagaaattgatttcatcgttttcaaggtaaatgataaacaatatattcaagtaacctaccagcttccagaaaattctactagagaaactgataatttacttcaaattccaaataactacaaaaaaatagtcatcactggccgatatgaaaatgaagaaatgatttccggtattccaataatcaatattaaagattggttattaagctctaaaaactgatcaaaataggatcgactaactcatgtcgatcctatttttaaattaaattatgttttttacaataagtaaaaattccgtcatcttgcacgctgccacagatgtcatcagcaatttccttcacatcgtctgttgcgttccccattgcaacgccgtgaccaacagtctttaacatttcaatatcgttgccgccatcaccaaaggctattgcttcgctcacagggatttgataataatctaacactttttcaattgctacacccttactaccagtagctggaataatatctgctgctctatcccaccaagctgttaccttagcattttgcgtattagctacaagtccgtcataatctttttcacgacagcctaccattatttgataaaccgtatcctgatcgacaaccacatcaaaatctggcgccactttcaaatccgttccaccaatagcaaagtattcctttaaatcctcatcaacaccattagctgcaatccgtgttttggtagctacagctaacggccgatttattttctgagcattttgaattatctgcaagacatctccttgccttaacggattatcaaaaacaatgtcttgatcgttatagcagtaagaaccattaaaagttaaatatgcatcaaaatctacacccaacttaggcagttgcactggtggtctgcctgatgcaatacaaatcataatgccgttgtcttgtaaagcatgcagtgtctctagcattttaggtgtaattgattttttcttttcaattaaagtaccatctatatcaaaaaatattatcttaggtttgctaattatttttaccttctaaataattttctactaattattatactttaaccgatatttcccaggaaatattaaaattgagctctcttcctcaacatctgtgctaaactagatacaattagtttctttaaaagttaatagttacggaggaatttttaaatgcagacattggaaaaagtctttcatttacaagatgctcataccactgttaaacgtgaattaatcgccgcattaactacgtttgtcagtctctcctacatcttatttgttaacccaaacattttacacgcagctggcattcctaagggagctgctttcacagtaacagctctcgcaacagcagttgggtgttttttgatgggttttattgccaattacccgattgccttggctccaactttaggtagtggcgccttttttgcttacaacgtatgtgttgggatgcatatttcctggaaaacagctttagctgcagtccttgttgcttcagtgttattcattttaattactgtcttcaagctacgcgaattagtggttaatgccattccacaagatatgaagtatgctatttcagcaggaattggattgttcattgcctttattggtttaaaaaatggtcaattaatcgtcaatagtgattctaccttggttactctaggaaaatttagtactccagccgtttggatcacattatttggcttaattttgactgttgtgctaatggcattaaacgtgcctggctctatttttatcggtatgattgttactgcaatcttcggtatgatcatcggacaaattcctttaccacatggaatcatcgctggtgcaccacgcatcgcaccaacttttggtcaagctgtcttccacattaaagatattaataccgctcaactttggatggttgttttaacattcttgttagtcacattctttgatactgctggtactttgatcggaatgactgaacaagctggcatggttgataaaaacggtaaaattccacggattggtcgtgcttttttagccgactcaaccgccatggttgaaggtgctgtctttggtactgccccacttggaacttctgttgaatcaagtgctggtattgctatgggtggtcgaacagggcttaccgcaatttttgtagggatcttcttcattatcagtatgattttcagcccgttacttcaagtaattccaactactgtaacagctccagcattaattatcgttggagttttgatggcaagtaatttgaaaaagattaactgggagaagtttgaaatcgcttttcctgccttccttactgttgtagggatgccgttaacctacagtatttcagatggtttggcattaggcttgattgcatatccaatcacaatgattgcttccaagcgttacaaagaagttagtcctatgatgtatatcttgtttgtggtattcgtcatcttcttcttggttactaatttataacatgatattacgactcattcttttaattaagaatgagttttttctttataataaaatataggtagtttcacatgaaacacacatacgagaggtataatcatgaagttaaacaaaaaagcactttggatcatcggaactttaatattatctgccattactggtatctttttctatttaaatggacatagtgcatctgccaccgctattggagttatcttagcaggattaactttatattttctatttcagaccggccaattatataataagatctggcttaagatcttagtttatcttattgatgcagtttggattttaattgtcttgctcacaattagcttatttattcattagcttcctttttcccaaaaaaaatagcctaagttgacaaaaagcaaacaccatttgacaagattcagccaagatttgctcgacatttttagctaaaaaagccaatattaaactataacttttcaaacgaggagtgaaaatgaatgatagatattcaagcaattggtcaacgcattaagagttaccgcgaaaatgctaagctaactcaagataatcttgcacaaaagttaaatgtttctcgtcaatcagtttctaaatgggaaaaaggtggttctttaccagatattgaccgtttagtaactatgagtgaattatttgacatctctctagataagttgatcttaggtaaagacaaaaatgttcaaaaagtcgttctggaaaaatcgccctctacccatcttaattttggggattttttagcaaaatattggtggatcattcttattcttttaccattaatcggtgatgctatttctgaaattattgaagctttttcgtaggagttaaaaaatgaaaaaacaaatcttcttaattaccttattattcacaatattagttagtttatctggctgtcaatttatcccacatcattacactaatatcggacctacaatcaagaaaaacatgactcaacaaaatttcaatgagattgatgccgatgtaagtttattagacttcaatttacaagtaagtgatcatcctaaggtcatctatcatggtggtaaaaaaataatgcccatagttaaagttagaaatgggaaattaattattcgtgatcaccaccatgttttaattaatattaacagcaacgaaaataactatttgactatctatctacctaaaaagcaattagctaaaatcaagattaataccgatgatggcgatattacttgttacggtcaagtgaaaaccaaaaagctagccttccatagtgatgacggagacatcaacgctgactactttaatgtgacaaatggttctgttagttccgatgatggtgatatacaaattaaggatttacgttcacttgccggattcaaagcgacatctagtgatggagatatttcaatcaaaaaatgtgatgcttcaggcgtagatctgaattccgacgatggagatgttatctatcatcgtcataattataacaatgatgatggtggctcttaccaacacaacttgcatagtaaaaatgtcttaattgcaaatagcgatgatggcgacattaaagtaaacaattaataattacgattctaaaatgagaagcatggatgaaaacatgctttttttgttgctttattgtttacaactgtaaatttaagtggcatagttacatatgtaaacaataggaggaaaaaatggttaaactacaagaaaaagagagcacaatttctgacagtgagtgggaaatcatgcgaattatctggacgatagaacccgtgagctctactaaaataattcaagaacttcaagctaagaaagattggtctgaatcaacaattaaaaccctattgcgccgtttagttaataaaaacttattgaatactactaaggaaggtcgtcatttcgtttactcggctaaagttaatcaggcgcaagtaatgactgaagcagcacaagaattgttagatcggatgtgcaatatgcataaaggagaggtaatcttgcaactcctggcagattctcctatttctaaaagtgatttagcaaaaatgaagcaggtcattaatcaaaaagaaaagactgctcctgaaacggtgccatgcaactgtttaccaggaaaagagcatctgtgctaaagagaggtaaataaaatggaaatttcacaaattattacactaattgtagccattctactaattggctttatcctctggtggttctttggcaaacatacagaaactgtcgggaccgctaatgtaggccaaggatcacaagaagcagatatcgttgttaagggcggttactccccttcaacgattgtcttaaagcaaggcgttcccgccaaagtgaacttcgacatgcaggactcaactgcctgtttatctcatgtcgtctttgaacaacttggcgttgacaaagatttaactaagcaaaaagttactacagttgatattccgactgataagaaaggtacatataattttgcctgcgggatggatatgttccacggtaaagtcattgttaaataaggagtttacaaaatgagtattttttcaaagaatcaaactaaaaaagttgttgttaatgcagaaaatcatggttataaaccaaacactgttactttcaagcaaggtaaaccagctcaattaaagtttattccatcagataatatgggctgcatgaatgaagtagtctctaaagatttaaatattgaccaaaaattagatggtaaaaaagaagttacgattgacattccaactgacaagccaggtacttacacctacgcttgtggaatggatatgttccgcggaaaggttgttattaaataatgaaactttcaaacattaagcgcttctggatctcatttattctagctattccaatgctaatccagatgttcgccatgccctttcactggatgatgccaggctataattggatcgcttttatcacgactacaatcattatggcgatttccgctgccccttactggagcagtgcttgggccgcttttaaacaccataacgctaatatgaacacattagtagccgtcggtacttctgtagcttacttttacagtatctttgctatgtttactggacgtgaagtctactttgaaagtgctgctttcgtcaccgtcttcgttttgctcggggatgcaatggaagaaaagatgcacaataatgcctcgaatgctttagctaaactaattgatctgcaagctaaagatgctgaagttgaacgtgatggcaaattcattaagttgccactagatcaagtcaaagttggtgacatcattcgcgttaagcctggtgaaaaagtccctgtagatggcgtgattgttgacggttcatcgactcttgatgaatcaatggttacgggtgaaagtatgccagttactaagaaaaaaggcgacgatgttgttggctcaaccatcaatactaatgggacttttaccttcaaagcaactaaggtcggtagtgacacgatgctttcgcagattgttgatttagttaaaaaagctcaaaccagccatgcgccgattcaaaacctaactgataaaatatctaatatctttgtcccagtcgttttaattattgcaattattaccttcgtaatttggtatgttttcttaggcgcaacattggttaatgctatgctcttcgccgtttcagtagtcgtaattgcttgtccatgtgcactaggtttagcgacaccaactgctttaatggttggtactgcccgtagcgctaagatgggcgttttaatcaagaacggtgaagttcttgaagaagttagcgacattgataccgttgtgtttgataagactggtacaattaccgttggtaagccacaagttactaacgttgtaggtgataaaaacaaggtcttaactattgcagctagtttggaagaaaattctgagcacccactagcaaccgctgtagttaaagctgctaaagaagcaaagactgaaattaagtctatacaaaactttgcagctattgaaggccgcggagttaaggcaaactatggcaatcaagaagcttttgttggtagcgatcgtttattagaagatatttctatttcccaggaaatgaaagatcaggctctccaacttcaaaaagaagcaaaaactgtagtctatgttggcctaggtaatgacatcattggcttaattgccattcaagatgtacctaaagcaagttctaagcaagcaattgcggaacttaaaaagcgtggtttaaagacggtgatgcttaccggtgacaatcaaaatgttgctgaagctattgaccgtgaagtcggaatcgaccaagtaatcgccggtgttttaccaactgaaaaagccgctgagattaagaaattgcaggatgaaggcaataaagtagcctttgttggtgacgggattaacgacgcacctgcattgtctacagctgatgtcggaattgctatgggatcaggtaccgatattgctattgaatctggcggtatcgtccttgtacagaacgacttaatgggtgttgttagagcacttgagatttctaagaagacctttaacagaattaaattaaatctcttctgggctctgatttacaacacgatcggcattcccattgcagcaggtttattcatggcctttggtctgcagcttagtcctgaacttgcaggtttagctatggccttctcttctgtttctgttgtaactagttcacttttattgaataaaacaaaaattgctggtgaaacagctcaagtttcaaagtaaaataattctccgaccggatattttaatccggttttctttttgtaaatttttcaatttgcgacttaaagtttcagcagtaatacccaaatatgatgctaagtctttcttttttaactttaattccacatttttactcccctgtttttgagctaagtcttgcaaataggccattaagcgttcctgagcatccattgaattgcgccgaatagagttagtttcgattgtaaccagctgctcgccaaaattattaagcaaattcaatgctaaatctggcgtctttttcaataacttttgaaaatcacgacgctcaatagaacaaacataagtatcttgtaaagcctgcacaaagttttcctgggcatgttcttgaaaaagattctgctgtccattagcatcgccttgattcagcacacctaatacggtctctttaccgtcttcgttgagattgtaaatcttggcactgccttgatccataaaaagcattccgttcttaccatcacctggttgtcgaataatactgccttttggaaaatattcttgatgcgttgaaattggtactagtttttctaacatttcatttggcaaatttttaaatatggctgctttgcgaatacaagccatgggtgaatgttgcataaaagcctcatttcttgatctaagtcaatttatttttatctgcatcttaatacaatgtatttaacaactcaagcagaaaggaaatattaatcatgactaaatacatcgcacatattgagcctttaaacgctgaaaaaattggtactaaggcacacggtactgccacttttgaagaaaaaggtgatcaactacatattcacgttgagatgtttgatactccagcaaatattgaacactgggaacatttccatggcttcccgaatggtcaaaaagctcatgtaccaactgcagctcaagacgttaaccatgatggctttattgatttaccagaaactgagccggtctcaggaactacaatggtgccacttgatgatgccccagaaaacatgaatattcctcatgatggttatcctgttgccgacagtaatggacattatgaatatgagattgatgtctcattaacaaagctacaaaagaaattcaaagctgcctttggtagcgataaactacaactagacaagcgtgtagtttacgttcatggtgtacctgcagatctggaattacctgatactgtaggtggttgcgtaatgagttatgatgcccatactaccttgccaatcgcagctggtgaaattgaaaaagcttaagttaaaagccattccttgtgaatggctttttgcatcctttcttattttttgatagcatagatatagattatgtaaagtatctaagaaaaggagatgttttataagtaggcttagatcctactcttatggagaataacgaaaaaattattcaagaaaagaaacgcgaaaaatttattaaaactaaaaagaattacaagcgtgcaccactaatgtcagttcacttaagagtgatgatggccgttatcttaggtcaaatcgcctgtggctattccctgggaattagtggtaccgctctttctaatgcagctaaatatatcaacattagtgacttctggactggattaattggggctggtgctttaattggccttgctggtagtcttttggtcggtcgactttctgataaaatcggtcgccgtaaactcttaatgtggaatatgtatatattagctgctttttctttattacatctaataaccgctaattttagcttaacctttatcctccgtattggaattggtttaatgattgctgttgactatactgtagggaatgccttgttaaccgaatggctacctaagggtgaagacagcaagcgccagagtcatttattaatctactggactattggttttattttgtcttacctagctggtagttttatcactggatttgatagttatacttggcaaataatcttagcaacaagtgcagtacctgcactagtaactgctatcttcagaagtcttttcccactccctgcttcaccaggctggctagcaagtaagggtaagattaagacggccaacaaggtcattcgtaagcacatgggacgcaaatggagattacctgcccgctttatgaagcggaataaaaagaaaacgcctagaaatatttcctgggcaattttattttccaagcaatatctgcgacgtactctagtaggtgggattttctatgcctgccaagccttctcatttttcggtattagtatcttcttgccaattttattacaaagcatgaatatcactagtggaaatatctcaggaattatctacaatggtgggatgttcattggggtattacttggtacttggattttcaacaaagttagccgtcgcttttatctgatcagtaacttcttagtttctggcgtgttaatcggaattttggcaatcgtacctaatttgaattctatgcttaagttaggaatctttactttatttgccatcattttatctgccggcttaattttagactatccttatccaactgaattatttgatctcaaggtgcgagcaactggtgtgggaacttgtatcacaattagccgcattggagcagctgcagggactttccttttgcctgttttaaccaatgttggtggtgccagcttggcaatgctagtctgtgctattgtcttgctctttgcctttgtggtctgcttaatttgggcaccagagacctcacctaaatttatgaaaaataaagaaaataactaaactatcatattaaaaaagacagattgtgcatgcaacctgcctttttttacttatcttttttcttcttgtccttagaatccttatttaataattcttctggatccttatgcttaggcgtcttctttggatctggtacagtcgcaaagcgatcaagcatcttctgtaagttattagggttgtcaaaagttaatcccataaaacatcttcctttcgttttctcaattatattaaaatttcaattcaaatgacaataattttaaccctcattatcaataaattgttgcatcttaatcatttctgaaccagctaaatcaacgctaattaaatcactataatcatgatcactagtatctcctaaaccatattcagttacaatttttaggtcgaagccactatcagagcgatcttcaattaagcctaaccgatcaggataatgataaattgaatcactaattttcactatttgatcttcgggccaattatcaataatttctgccagtgactgaatttcatcccgtaatttaactgaacgctccagcctgtccggatcaaaactgcaattatttttttgccattgaactaaaaaattaaagaagagcaagcgctcggaatcttcagtaatatgcgttatatggctcctagcaatcactgcaattgattcaacctgccctaactcattgatgctctcgaataccagattatcatcgtcatacttgagtactttaccaatagcaaaactaccatattgatcatcaaaggtataatcaaaataaatttcaaccagatccaagtcgttagtgaattcttgcttctgtgattgccgcaaatattgggtaaataagcgattatcaatggcattagtatcgacacaaacaatatcgtcaagtggtataacggtggcataatgctctaaagttaattcattgcgttctaaaatacgcacctcttgctgatcaagttgagtaattaagccagtgtaagtagcacctgtattcacctcaaaagttgtaaagggttgcgcgtcagctacgttaatcagtaaatcatgcagattagtaaaatcccaggctaacactgtcttatttaattgctctaagttaaatgaatccttaacttgggtaatcatataatagcgtagattaggcgtatcgtcttcaatcttagctacttgatcttctttaataaagactattccacctaaattaccgccttgatcgactgattcaaaggtaatccagccatgatgttgcgtgataatgcggccaatatagtaagaatttgcatcaactaccgtaatacttgcatccccatctaagttatatttttcttgatcagccttaagcgtgatttgtacaagtttattcaatttttcgccccctcttttttcttccgtgaatttaattgtcgcctaatcattatttttctgcaagaaaaaagaagatggtttagccatcttctaatattgagttaattctgtagaattttggggctaacgaatattacttcttttgtgcagctgcctcagcttctgctgctgtgtttgaaggggttaacgaagtactgtttggatcaaaacgcacatcgcttgcttttacataaccatcagcaaattggacttcaccttgattactatagacagatttaccaactaagtgataaaacagttctgccttattttcacttggtacccagatgtaaagcaacttatttaccttgtatcttccaccttgttttctaacttgatcgcccttgaagtgaatcttgtttccgttagcatcatagatatcagttggcttaataaattgaattagtgattttttagtatgataataattttgaactggaatatctttagcagctttaacattgaaattataaatccaataatcagttcccttaatatgatagattgctaattcgttgtcatcgtcaccatctctaccagtatcagcacgtgtcccttgctctaaacgatccactgtaaacttatcaccttgttttgcgtattttcctgaaggctgaactgcatctttatcaggtacttcaacaaaaagagcagcacgtttatcagttacagtaacagtcgtttcttctgatttagttgtttgagacgaagaagaactagtgttgttatttgtattaacactaattacaggacctaaattataagacttaatgtactgtttattaggtccacctattctaaagtaatgctttccgttcttaaatttgtatgaaccgccataagtcgtaatagtttcacccttatacaatttccaacggttattgtaagaggttctgccagttgaggtacgataaatgtaagtattatgagtaatcttacgtgttacaccatcaatgttggtagcctttatgtattgatccttgccgcttactttatagtaaagcgagccgtcaatttttacagggttgctttcaacagtgacatattgataggcattgtattttacacctgtgctgttaccatccttgtcgtaagctaaagcagtatgcataactgctttagtcgtagcagcttgtacttcattagttgtattagtcaaaacagccaagggtgcaactgtcattaatgtagctgcagaaattaatgcaatcttatttttcttcatcataatcatccttttcaaatctctacactgctattatattctctaaagctaattaaagcattaaaaagaagcccattaagtgaagtggacttctacttttgatattttcttttaatttattttttcaatgccgttgcctcagcttctgctgctgtgtttgaaggggttaatgtcaaacctatattaacaaatttaacatcactagctttaacataggcatcattaccgacttcaatttgatcaacgttacctgtagcatagaacttagtaccaactaaatggtagaataattctgccttgttttcacttggtacccaaatgtatatgagtttatctactttcagatttccaccttgttttacaatttttgcgccattgtggttttgcatagtaccgtcagcattatacacatcagtatccttgacaaatttgatatagccataatgttcgtgatcataatcatgctttactaattttttatcggcagttacatcaatagctaaaagccaattgtctgtaccttttattctatacattccagcttgtgctgcagttgatggaaaatgatcagcaaacggagtaacttctagtttatctacaataaacttcgtaccagctttgagattctttttgattgctttaccttgattatcataaatatttacaccgtaagcattttttacggtaacagttgcttcctcggcattagtattagtagcgttgtttgattcattgctggttaaatttgatgcagtattagtactaataactgggcctaaattatatgatctaatatattgcttacgtggcccacctactctaaagtaacgtttaccgtttttaaatttatatgatccaccatatgtagttacggtttcacctttataaaatttccatttcttactgttggcagtcataccataaggtgtcctttgagtagaagtccggtatatataagcattatgagtaatctttcgggttacaccatcaatattagttactttgatatattcatctttatctgtaactttgtaatattgacttccattgatagttactagttttggatctacatgaacactaccataaacgtaatatttatgaccggtactatttccatctttatcataagctaatgcgttgtgcataatagtcttggttattgaagaatctgcttgtactgtgtgagcgctagttgtagtactcaggataggtgccgttcccattaaagctactacagaaattaacatgattttattttttctcattattaaccaccctttgaaaatctctatacttcaattatcttactttgtataaacttaggcaacaaaaatagcatcaaatcatattgatttgatgctattaaggctaaaatttacaaatttagtcccaagctaattcataaaccttatttgaaacagttttatttttaccgttaacattagcatggtatgcaacagttaagtaaccgtgattttcatcaataatttggatactttcaacttcactatgttcacctgaaatatctaatccaccaaatgcacttaagtttacattttcccattgagattgatcattacgtgcataaaacggaatttttacaatttccttgtgatagtatgaccatgaaccattacttaaacttggtgatttttgactagtaatataaatattaccagaattatcaagatcataaccttgtacagagtttaaaacagatccatacaaaccatatactgtaaaactagtttcacattgataatttcccatatttacgaaaccattatttccagcctcatctaatgcattattaatgacatttaggtcataaattgaaaagtggcctgttccattattctcaatagtagcaattaaaagcatactataatctggtgaaactgctacttcagcgcgttccatttcatcaccagagcattgatcttcaggattacctgcgcggttcaagtatgctaaacgtgggaattcagtatttgatgaagcatatgatttgtatctaatatctgctcgagcaatttgagaagcccatttattcttgtttttagtaccaacgaaccatttaccagatctacctgaatattcccaagtttgggtgtgtccagctgctgcacctactaaagtaagcacaggggttgtcacgttgccacggaagccacgcaatacatgtgtttctgtctggttatttcttaactgtaaaccataaacatactttgatcctacattacctttttgaactacagctctgtaacctgtattcatatcgaatctatctaaaattctaatatttgttgcatctaacataataaaacctccgaaaaatttaaaaactactacttatcctgagtttgctcattcatctgtttagccacttccgcaaagatatcctgcacttcttgcttgttcagcttgaagccttttgcctcaagactgttcactactgctttgccaatgcgattaatcttctgttcgtcagaaagattttccttgtcgtataagcgtacatagcttttcatcaagttgtctgcagtattgcggaattgctctaagcgcttgttcttaaaatgaaccctgctcaagatgccaatacctactacgctaattacccataaagccaaagtaatcagctcgacgtaatcatgaatatccatgattaaataaatcacctctcttttgatcgaatgatcagagggggttaacgaatgtccattggacttcacctctgtttgataatgttcaacaagacactaatacacttgatttatattagtttttagactaatataaatgtataagaaataaccgaaagctggtaaatgttccgccaagaattttattaacttaggttgttttctttttcatatctcgttgacaatatttactataagttaattaactaattatgtcaataaaaaaagctaaaaaactattatttttttcgaacaagtattcctgaaaggcttggtatgattgagttagagcgcacaaaagaattagcaaaaaaatacaaaatgaatctccgtgaagtaaatgacaaggcaggtttaggtagaaattccatctataattggaagaatcaaagaccaggaattgatgcacttaatgcagtcgcagatgtactacatacgtcagccgattatttaagtggtaagacaaacaatcctagcccgtcacctaaaggtgatgaaactggtggtatttctattgatggtgaagtaccatatttctatcatggctacactattccagaagactacctgaacatagttcgtcaacttatggaacgtgatatcaaaaaaggacttattaaacgacatgacaacagcagatcagaataaacaagaactcatagactggttattagcctatgctaaaaaacgtgatattatggttgaattagttgaagtaaatccaacttacccatccatttctttaaagaactatagattcgctgtcattaatactaattggcatcatcaagaagaagtaccattttcaataggtcatgagattggtcacattatgctgactaatggtgaagtagattctcgtcaatatatcacttttacagaacagaattccgaagaaagtccagcagacatcttttcaataaagctaatctataattactcctgcaaaatgggtgattgcttcgaagatccaggtttatttatgcaagcatacgggataccaaatcgagtagctgatgcaactaaagagatatttaagcgagcagcttaaccatcaacttctatattgatttgattactaaaagttttagcattagtttttacactacttaaaatccaattaatagagtagagggagttttataactcgcccctctcattgcaccggacgtacggttccgtatccggcgctacgtttgtgattatttacgagataaataatattctagcggatcgaccaagcctgggcgatccgctttgcttatgcccaatacttttgggctaagcagaaagttaatgacatgacccgtacttcttttataccaacctaagcgcgtattagctactttatgaatatcttcatcactaaaattgcactttagtgccttgttaatccgcattaagttaatgtatattcgttttggtagtttccattgtttaatgattaccacccgtactttatgacgcagccattgactgaacttaattagaaaatatttcatgtcgccaactctaaagtaattgacccagcctctaactacttgatttatcttagtaaagactagtgatagaggctgagcagctgcttttctgcgacagagaagttctctcatcttgtcataaagcttgattttgcggtcatctcctggctttgcttgccagtattcgccacttttccagaaggtaaagccaagaaagttgctcttggttggtcgtacaactttggttttggttgcgttgacctttaggaatagctttctttctagccatgatgaaattgaattcatcacacgtttggctgatttaccgcttttgaaaaagatattgcagtcatcggcatagcggacaaagcgcaggcctctttgttccaattctttatccattttatctaaatagatattggatagaattggtgaaagagggccgccttgtggtacacctagtttattaggcttaacccaaccatcttccattactccagctttaagaaaggctcgaattaaatggagggtggttttgtcatttacttgctctctaattattgaaatacgcgtggtgctagttaaatcgttttagttaataaaaaagtccaattagactagactcaagttgtaagtaatttaaatagaaaagagtctgatctaattgaactatctcaagcttaatcgtttttctcaccatttacaagttagttttaatcggttaaatgtgatttgtcgctcgctgtataagctttatgcgcctgatggacttaaacatcgtaaaaatgttgatcagaccaagcttcctgatagttctatcttagcgatgctcatttggcaaactgaaattggaattgaatctcaacgaagattctgtaaattcttcgttggcttatctcattctcgttttaaccgtcgagctcgaatgctcttgcctctaattcgttgtatccgtcagggttggaatcaggaagtaaaggtaggtggagaattattgattatcgacagttttccgattccagtttgtcagcctgttcgcaattatcacgttaagatcttccgtggcatagccgatattggttataaagcgacgaaaaaaatctactattatggcttcaaagtccacgcaatagtgagtgatgatggctatctgcttgactacgcagttactaaggcgtcggtacatgatgcaaaagagacggtagaattgatgatcaatgctcatccaattaaccattatcttttaggagatgaaggctatttaggaaaagacttagcagccaagctaaagcgtatgggatacgtgctttggacaccatatcgtaaaaacatgaggggtgctaaaaagcataatgatcatcagttaatggcaattagaagaacaatcgaaagcgacttttctttgcttagctattacaatgctgagaataatcgagccaggagcttagtaggttttcaacaacggctagaaatagctattttagcttataatatggcatattgtctagaacgatttaactagcaccacgcgtattgaaattaatttatcatgatttaccgtgtcaaagtatttctcaatatccaggtcaacaacccattgatagccttcgtttaaatattccaagacttgttcaatagcgtcatgagcactgcgtccaggtctaaagccatagctatgctcactaaaatgaggatcatagatcttcattaatacttgggcaatagcctgctggattactcggtcaacaaccgtgggtattcctaaaggacgtttcttaccattagctttaggaatgtagactctgcgaacagcttgcggacgatacttcatcttcatgatggcgtcctttatttctacttgatgctttttaaaatagctatcaagctcatcaactgttctcctgtctacaccaggcgctcccttattgattttgactctcctgattgcttccttgagattattttgacttaaaatctgttcaattagttccatctcgtgatatctccatttctacttgtaaatttattcagaattgtcccaattgctttcaccatcaaagagttacgttctctttgtgctaggctatcctcttatccggactgtctgaacattgcttatagcgagatatgctcttacaaacattaggcccttcgctccagtttcattacaaaaccttcagcactactacgacctcagctgacttctcgcgattaacctttttcgaccaggcttacgatcgctgatattaaagcttactcggtttcacctgtccacgagatctctcggggtaagacattcatctttaattttccactgccccctggtttaccgtcttggttttacggttgtcctttggactttaacttgtgctgcagtctcatccaccatttggcctgaccaggtttctgtacgtaggctcggaaaactcgctagccacttccttcacccatagcgtcaccgctaacggcttgtggttcgctacacttggcgacaactacccgtgatctagactttcactagactagacaaatgccatgcccgacacacaacaaaaaatcgctactcaattgagtaacgattttttctatccatccagttcaacgccttgtaagtccttcatcttgctataaaccgcgccacgttgacttgaatcaaactccagaataagcatatctccgccgcgaattacggtttgaccatttggtatgatctcatctccatcgcggtgaattgttcttaccctagtatcaaccggccattgaacctcagaaatggttttatcaaccagtctactgctctcatagaccggtagagccattgtatcagcctgaccagtatagttagccttatggtcactactcttgtccatagcggctgctagaagcccgtagataggcttaccgccaagaagttcatcaactaataacgcaatgaaggccaccacagctaatggcatcaagtgaagtaaggaccctaccatctcagtaattaagataatcgccgtaaatggtgcacgaatgattgctgcaaaatatcctgccattgaaaaaatcactaggttaactactaaacgctgcggtaacaagcctaactgtaccatcatcagtccataagttgcaccaatcaaagcgcccattgtcaaaattggcaggaagataccactaggaagacctgaatcataagcaacaatggagaaaacaattctcatgacataatagaaggctagcatccctacaatgccccaacctgttttagtgattatattcggcaatgccagaattaaccgattacctggaccggtgattaatggccaaaagtaagcaatcgggattaatattgccaaaggaataagtccatgcagccaacgaggtaaaatggtgattttagcatagaccttctttaaactaaataaaccaactttatataaatgacccaataagcctaataaaatccctaagataagcaagtgccagtacaacgaaatcggaaatgaatagttatattgaattgctagggcgtgacgaatgccaaacaagtttgaaacgacaaagtttgaagcaattgcgccagctaaagcattcatccaaactaatggtgaaaagttatggaatacttcttctaagacaaacaaggcaccactcaaaggagcgccaaaagcggcagacaaaccacttgaagcccctgttgcaagcagaattctagtttttaatttgttctgcttgcatccctgagcaacaccttgaccaattgtcgagcccagctgcaatgatggtccttctggtcctaggaatagccctgtgccgataaccaagataccaccgattaatttccgccataaaattggaaaccattgtagtgatagcttcccttgcagttgcaattttacttctggaataccagaaccaccaacatggggatattgtttaacaaaataaccagcaattaccgctactgcaataaagccaatgataatcgcaacaaaccacaacggattctggtgcgctaattgaaacaagtataaccaaaatccagatgtcttttcaattccaaatctaaataggccaactaccacgccagtacaaattcctacaagtagagcttggagcaatagcttgatattagttctgtttgcctcgtctttcatttctttccctcgcaataaaaaaaacgtgtcaaaaactattgtacactaaaaaagccagctagattgttctaactgactttttttcgtttcacatgaaactatttatttttcttcataccattcagtgtggaagacgccttcacgatcatttctcaagtaagtatgagcaccgaagtagtcacgttgaccttgaatcatgttagctggcaagtttggattaaagatggattccaaccagttaagagctgcgctcaaagttggagttggaacaccacacttagtagcaaattcaactgacttacgcaaagctggcaagttttccttcatcaagccgcggaaataatcgtcttggaataggttcattagcttgccgttcttgtcataggctttttcaatatccttaagcattgcggaacgaatgatacaacctgcttcccaatcttgagcaattgacttgtatcttaagtcccaatcataagcttcagcagccattgtcaattgttggaaaccttgagcataggcaacagcttgggctaattgcaatgatttttcgaatacgtcaaccatatcatcagggatttcaccattgtattcaaacttagttggtttaacgcccttttcaattgccaagtgtgcttgcttactcatgaaacgtgccattacagcctcggctaccaccgttacaggagcgccaagtgcaacaccatcttcgagcatccagttaccagtacccttgtatgaagcaacgtttaaaatgtgatcgattacgtgatctggcgttaaatcatctttttgtgccaaaacctttgaagtgatttcgctaagatatgcttctaccttaccatgattccatttatcaaaaatttctgacatttcatcatcgctcttgtgagcaacgtcacggagcaagttgtaaacttctgaaaattcctgcataataccgtattcgataccattgtgcaccattttgacatagtgaccagcaccttcaggtcccatgtagtagacacatggcttgccttcagtattcttagcggcaatagcttcaagaattggagcaacttccttataggctggttcatcaccacctggcatcaaagctgggccatttaaagcaccttcttcaccaccggaaacacccataccgataaagtgaatcccatgcttctccatttcgtggaaacgacggttagtatcgtgataatttgagttaccaccatcgattaaaatatcgcctttatccaaaagcggcagcaatttttgcaaagtttggtccactggatcgcctgccataatttgaatcaaaatcttgcgtggcttttcaagtgagtttacgaactcttcccaggtgtagcaaggctttaatttatcatcttcatattttgcgaaagcatcaacttctggtttgtcgattgagaaacctgaaacggaaaagccgtggtttctaacatttaaagcaaggtttttgcccataacagacaaaccaataacgccgaattgttgcatgtttaataattcctccattaatcaaaattcatcaagtattattatacgttcatgcacgcaaaaaagcgaagccgaaaggttccgctttttaaaatctagttaataatttttttgttattgggtaaaagtgtttcacacactgttcggtaatatttcctaggaaatattacttttattgatcaataccccaaagtaaaatgttaaatgctaatggtaatgttagcttggtaatgtatccatcctttttagcctgttttaaagatgctagaacaaatttacgttgttgaccctttagctttttggctgctttaacagctaaattaaagtcatactcgttttttctaattctagtagctctagcttttttagaaatcttttgccatttataagtagctctcttacttatcctgttaagtggcttaacgactccttggagtgctttactcttaaaagcataatattgcattccaggattagtagtccaggtgctatatttgttgtctttagaagtaattaaatacatcaacgcaccgttatgatgtttagcatatgcaatttttaccactttgaatttaacattcttcacctttttaggactgatagtatctccacttctaaattcagaatcatttagcattttttgataactatctttgcccacagaaataggttgagaatcggagtttacagttacaatgtagctccacttgctaagtcgaggaatatttttaattgttatagctttatcaaacttagctactgcagttgaattgctgttgtctgcagcgttggcagtgacagacgatgctgaaaataatgctgcaagtaaagcagtagcaagtaaactaattagagcttttttagatttcataatttagcatctttttacacatagtgcttattggctaataagcattaattcatatccaacactgtctattataagcatctgtattctatttactagccaacagactattttatatttaaaatcgtatataaaatgagactatttcccaggaaatattttcccatacaaaaaaaagcgggacaaacgtctcgctttttcaggttactcaaccaaattagtgttgtgacgcacctgaaaccgtatcaggagcaggatcctcttctggttctgattcttcatgttgagatgcacctgttgcagcgtcagcttctaagccgtacttttctgcaaagtaactgaatggcttcaagtcttcagcttgatacttcttgacaaaggctgggtcgtcaagtgagttcaattcagttgagtaaggcatttcgtgagtgtacttgacgtcgatcaacattggaccgtccatcttcttgaattcgtcgacagcatcttcgaattccttcttggtgcgaaccgttacgcccttaacattcataccttcagcaacctttgcccagtcgttatcagggataataacaccagataatggttggttagattcatcttcttgttctgcttggatgtaacccaaagtttcattagtgaagacgatgttcaaaatatgcatgttgtaacgagccatagtaagaagttcttggttcatcatagcaaaaccaccgtcaccagctaattgccatacttcacggtctgggtaaacagttgctgcagtaagagcagctggagcaccataacccatagttgcgtgcaagcctgaagtagtccacttttgatcatcatgcaagttcaaaagacggcatgagtcaacgttaacgttaccaacatcaatagcaaagatggcgttgtcatcagccttcttgttgataacatcccagattggttcaggacgtacaggcatttcatctgagttcttaaagcttgcttgccatgcatcccagttctcacggtctgcaatagcagccttgtaaagtggtgattcgctacgttcttcaccagcgtcaataattgctctcaaagccttcttagcatctgcaagcattgaaacatcagttgagtgacgcttaccaaacttagctgaatcaacatcaatttgaataaccttagcatccttagggaaccataaaattgagaatggtgagttgttacctacccaaacaactaagtcagttgcgctttggacttcttgagcagccttaggtccgatacggccgatagtacccatgtatgctgggaatttatcttctactacacccttgcctaagtatgatgacataataggggtcttgaacttttcagcaaattccttaacttcttcaccagcatcctttgcacctaaaccaatgtacatagttgggttcttagcttctttcaaaagcttaacagcttcttcaactgaagccttagttggtgctggataattgtctgctggatgagcatccttgtttacacggaaggtgtcatcaatcttttgccaaccgtagtccttaggaataatgataactgcaggaccctttcttgcgtaggcttgacggatagcttcatcagttaaaattggaatttgttcagcggtcttagcttggcggcaccaaacactagcgttcaagaaccacttgtcttcatcaaaagcttggaagaagtcaatatcttgacggctagttggaacgttagcaacaattgctaccattggagtcttgtcaaacttagcatcatacaaaccattgaataagtgggcagcaccaggaccagctgaaccgaaacatacacccaacttaccagttaacttatattctgcagaagcagctaaagcaccagcttcttcgtgacgtacttcaataaatttcatcttatctctaaagtcatagatagcgttcatacttgagtcgaatgaaccacctgggaaaccgtagatatgatcaattccccaatcgtaaataactttaagcattgcatcagaaccattaatttttgtcatataagtgcatctccttaacttttgttctttcataatgtattaaaacactttttttcacatttgcaaaccgataaaatcaccgttattacgcaaatgaaaacgcttttgtaataataatcacttcacaagctttaccaaattcaatatctcaaaaagctgaatggtagcgttttatattgtgatttgatgaacattattatactaaatttcacttattttatgtatattcattgttacttatagtaaaaatttaagaaaaaattttttacaatttatttcatagctatccaatttagaaaaacgttattttataattttgcgcataaaaataacgtagaatactattcctacgctatttttgtgctattctactttttcactctagagtaacgcccattttgaatgtaaacactcaagattgccaagtcagctgggttaactcctgaaattcgttctgcttgagctaaagtttcaggacgaattttttcaaatttttgccgtgcctcagtagctaaaccttcgatttggtcataatcaatatctgctgggatttttttggcttcttgtctctttaagcgagcaattctggtttcttctttcttgatatagccagcatacttgataccaatctcaacttgttctttaacgtaacgatcgcctggaactttttcaccagttaaccgttcaatatcagcaatagtaacattagggcgacgcaagaaaacatcggccttaacaccggccttcattggttcctgaccaatactttgcaaaaattcctgcacctcatcagttaaatgaaccgtaatttcatgcagtctcgtctttgcatcttcaatcgcatgcttcttttcttcaaatcgtgcgaagcgttcgtcagaaattaagcccagatcatgaccatattcagtcaaacgcaagtctgcgttatcattgcgtaaaatcaaacgatattctgctctactagtaagtagacgatatggttcattcgtccctttggttaccaagtcatcgattaacacgccaatgtaagcatcgttacggcctaaggtaaatcctggcttatcttgagcagataatgccgcattaattcctgcaattaaaccttgaccagctgcttcttcataacctgatgttccattcatctggcctgcagtaaataaatgctttacgtttttggtttccaaagtatgcttcaattgccatggttcaaccacatcgtattcaattgcatatcctggtcgcatcatttccgcatgttctaatcccgcaacagaatgaatcatctttaattgaatttcttctggcattgaagttgaaaagtcgcctacataaacttccttggtagtctttccttctggttcaaggaaaatttggtgatgatccttatctgcaaagcggacaactttatcttcaattgaaggacaataacgtgggcctacacccttgataattccagagaacatcggtgcacggtcaagattgtttctaataatcgtgtgtgtggttggattagtataagtcatccaacaagaaatttgtttttgtaaataatcttcatcacgactttcatatgaaaagtgccgtggggttttatcaccaggttcttcctcagttttagaatagtcaattgtattgccgttaacacgtggaggagtaccggttttaaaacgacgcagcttaaaacctaacttttctagattttccgacagcttaattgaaggagtagtgttatttggacctgaagaataagtcaattccccaataataattttaccgcgagccgctgtacctgtagtcaaaacaacgcttttagcatgatacttcgcaccagtattggtaatcacacctttgcagacgccatcttcaactaccaattcatccacgatagcctgacgcaaggtcaagttgggcgtattttcgatcgtatccttcatgtgttcatgatattgccacttatcagcttgagcacgtagcgcacgcacagctggccccttacccgtatttagcatccgcatttggatataggtagcatcaatgttctttcccatttgaccacctaaagcatcaatctcacggacaactgtccctttagctggtccaccaacagatggattacatggcataaaggccaccatatccaaaccaatcgtaaccagcaaagttttttgtcccatgtgggcacttgccaacgcagcttcacatccagcatgcccagcaccgacaacgattacatcatattcatttgaatcatatgttttaaccattttcatcctactttcctaaacagaattgactaaataattgcgtgattaattcatctggggcactttcaccagtgatttcacctaaagtatcccaagcaccagtaaaatcaatttgtgcaatatcaacagggacgccatcttcaactgcttgaattacatcttccaattctttcttagccttatgcaataaggaagcttggcgttgattggttaccataatttgatcattagaattttcaatcccagcaaaaaatagcttattaatcaattcttcaagcgcatctaagttttgttctttcaaaatcgaagttgaaataacatcactacccgttagtttctccatctcagtagttgttattttttgacctaaatccgacttatttaagatcacgattcgcttcttgtcctttgttgcttcaattaaggcttgatcttcagctgttaatgcttgactagcatcgattaacaacaagaccagatctgctcgctccaaggccttttttgatctttctacaccaattttttccaccttatcttcagtgtggtggattccagcagtatcaattagctctagcggtactccttttacagacacatattcttctaacgtatcacgcgttgttccagccacatcggtcacaatcgctttgtcgctttgcgtcagataattcaataaagaagactttcccacattaggacgaccaacaattgcagtagccaaaccattgcgcaagatttttccttcttgtgctgtcttcaataagcgattaattttatcaattactgatttagacgtgtctgccatctgttttgcggtaacagtatctgcatcatactctggataatcgatattaacctcaacgttagccaaagtattcagaatttcctgccgcattgcctgaatcttgtgtaacaatccaccagctaattgaccaatagccacttgtcgtgccttatccgtcttggcccgaacgatatccatcacactctcagcttgagttaagtcaattcgtccgttcacaaaagcacgtttagtaaattcaccaggatcagccattcgcgcaccgtgactcagcaacaattgtaaaatatgattagttaccacgattccgccatggcaattgatttctacaatatcttcacgtgtaaaggtcttgggcgcacgcagcactgtcaccattgcttcatcaatcgttttcccagtatccggatcgataatatgaccatagtgaatagtatgtgtcggcaccttgcttagatcttcgcctttaaaaacctcatcagcaatcttaattgcatcctcaccggacattcttacgattgaaattccgccttcaccgatgggggttgaaattgctgcaatagtatcgaactctgtcaaagtttgagccataattcttcccttttctcaataaaaaaagcgcattataccaccacgaataaccatgatggataaagcactttgactactttatctaaaaatcattttagactaatattcttttatttctttttgcgtcctaaacgcttgtaagcccttcttagtttacgtttgcgttcacgctcagcctcagcctttgcttcttgctctcttctatatttaatagggttttgcaagataaaggtttgaagcgcctggaacaagttggaaattacccagtaaagtgtaatagctgactggaagtttaaggccatcaccccaaccatgatagacattccgtacatcattactttggtcattccattttgcgatgattttggcgtcgataattgactaatatacgtcgataagaacgtaaagatcattgctaaaataggcatgatgtaatatggatcgggcttgcttaaatccatccataagaagcgcccagtttgtaactgcggtgtacgtaaaatcgcaccatacagtgcatacataactggcaactggatcaggacaggcaaacatccagtataaggatttacgcctgcttctttataaagcttgttagtttcttgttgtaataatgttcttgattcagtgtcacgtcctggatatttcttacgcaactcattaatttgtggttgaatgctttgcatcttagtagtacttcgaattgaaatagcattcaaaggtactaagatgacacgaacaatgacggtgaagacaataattgcccagccataactgttccccattaacttagctagccccaaaataaaagctgacatgtaataaacgatccaacggtcccaccaattaccacttgtatgtgagattggcgttgcttgaccatttgctcccgtagtagcacatcctgtcaatacaacagcaagtattgctactgctaagactgcaagaagacgtttgacatttctcttggtcagaatgtccttcaatctatttttcctcaactttatctggcatttcttcaataatatgagctaacgataatgcgtgaagcaagtttttacgcacctgagccatattaaaatcgcgagcataaggtcgcgtaatgattaaaaaatcaacatgcggattaatctgcaatttttcttcatcaatcacggcccgaatataacgcttgagtcgattacgtgcgactgcggtatgaccaacctttttgcccacagaaattcctactcgaaagtgtttattttctgttttttctaccttataaatgacaaaagctcggttagcgactgagtcgccagattcgaaaacttgctggaaatctttttcagattttactcgataagactttctcaaaacgtttcattccactctagtagactaaaaaaaacactgggattcagtggtttaagcagataagacttttctaccttttgcacggcgtcttgctaaaaccttacggccatttgatgtgctcatacgcttcataaaaccgtgaacacgtgaacggtgacgcttcttaggttggtaagttctcttagttgtcatattaaactgcacctccataaatttttgtgccaattgcacaatgtcttattaaggatagcacgaaaagccataaaaaccaagtattttaagaaaaaaagacttttaaatcccgtgaatattttctaaaaattcattgtttttcatgtggataaaaaataaaatatttttcttacgtataatttccacaagataattcccaacgttttccacaactcacatggtgttaaaaacttaattcacaccatgtggataacgcatatggtattttacctcaagtattgatagaatagtatccataattcacagctgtactgtgcataaattaacggttttgctcttatcatgtcaaaatgtgcatatcgctttaatagttatcaacaggctgtgtactttgttgatttctttttcacctgtggaaaaccagttaagtaaatggtaaaataaatttgctttttactaactgggggaatgtaca
